United States Patent Application Publication US 2026/0242768 A1, published August 20, 2026 (application 19/471,143).

The application's sequence listing, which the Patent Office published only in electronic form, follows.

SEQUENCE LISTING (980 sequences)

SEQ ID NO: 1 - DNA, 7589 bp, Alopecurus myosuroides
  source 1..7589: mol_type = genomic DNA
tcgataaacttcctgttgcatgtctctatctctatggactaacggttcctatgtgcatgcatctgtcaggtttccagacctggggtttacaatcagtttatggcagtctgtgtttgaagaacactgcaactctgctgtctgtccaaagggaggacgatgggatccacacatctgcccattgtcgggtttaatgcatccacaacaccatcgctatccactcttcgccagataaactcagctgctgctgcattccaatcttcgtccccttcaaggtcatccaagaagaaaagccgacgtgttaagtcaataagggatgatggcgatggaagcgtgccagaccctgcaggccatggccagtctattcgccaaggtctcgctggcatcatcgacctcccaaaggagggcgcatcagctccagatgtggacatttcacatgggtctgaagaccacaaggcctcctaccaaatgaatgggatactgaatgaatcacataacgggaggcacgcctctctgtctaaagtttatgaattttgcacggaattgggtggaaaaacaccaattcacagtgtattagtcgccaacaatggaatggcagcagctaagttcatgcggagtgtccggacatgggctaatgatacatttgggtcagagaaggcgattcagttgatagctatggcaactccggaagacatgagaataaatgcagagcacattagaattgctgatcagtttgttgaagtacctggtggaacaaacaataacaactatgcaaatgtccaactcatagtggagatagcagagagaactggtgtctccgccgtttggcctggttggggccatgcatctgagaatcctgaacttccagatgcactaactgcaaaaggaattgtttttcttgggccaccagcatcatcaatgaacgcactaggcgacaaggttggttcagctctcattgctcaagcagcaggggttcccactcttgcttggagtggatcacatgtggaaattccattagaactttgtttggactcgatacctgaggagatgtataggaaagcctgtgttacaaccgctgatgaagcagttgcaagttgtcagatgattggttaccctgccatgatcaaggcatcctggggtggtggtggtaaagggattagaaaggttaataatgatgacgaggtgaaagcactgtttaagcaagtacagggtgaagttcctggctccccgatatttatcatgagacttgcatctcagagtcgtcatcttgaagtccagctgctttgtgatgaatatggcaatgtagcagcacttcacagtcgtgattgcagtgtgcaacgacgacaccaaaagattatcgaggaaggaccagttactgttgctcctcgtgaaacagtgaaagagctagagcaagcagcaaggaggcttgctaaggccgtgggttacgtcggtgctgctactgttgaatatctctacagcatggagactggtgaatactattttctggagcttaatccacggttgcaggttgagcacccagtcaccgagtcgatagctgaagtaaatttgcctgcagcccaagttgcagttgggatgggtatacccctttggcagattccagagatcagacgtttctacggaatggacaatggaggaggctatgatatttggaggaaaacagcagctctcgctactccattcaactttgatgaagtagattctcaatggccgaagggtcattgtgtggcagttaggataaccagtgagaatccagatgatggattcaagcctactggtggaaaagtaaaggagataagttttaaaagtaagccaaatgtctggggatatttctcagttaagtctggtggaggcattcatgaatttgcggattctcagtttggacacgtttttgcctatggagagactagatcagcagcaataaccagcatgtctcttgcactaaaagagattcaaattcgtggagaaattcatacaaacgttgattacacggttgatctcttgaatgccccagacttcagagaaaacacgatccataccggttggctggataccagaatagctatgcgtgttcaagctgagaggcctccctggtatatttcagtggttggaggagctctatataaaacaataaccaccaatgcggagaccgtttctgaatatgttagctatctcatcaagggtcagattccaccaaagcacatatcccttgtccattcaactatttctttgaatatagaggaaagcaaatatacaattgagattgtgaggagtggacagggtagctacagattgagactgaatggatcacttattgaagccaatgtacaaacattatgtgatggaggccttttaatgcagctggatggaaatagccatgttatttatgctgaagaagaagcgggtggtacacggcttcttattgatggaaaaacatgcttgctacagaatgaccatgatccgtcaaggttattagctgagacaccctgcaaacttcttcgtttcttgattgccgatggtgctcatgttgatgctgatgtaccatacgcggaagttgaggttatgaagatgtgcatgcccctcttgtcgcctgctgctggtgtcattaatgttttgttgtctgagggccaggcgatgcaggctggtgatcttatagcgagacttgatctcgatgacccttctgctgtgaagagagccgagccatttgaaggatcttttccagaaatgagccttcctattgctgcttctggccaagttcacaaaagatgtgctgcaagtttgaacgctgctcgaatggtccttgcaggatatgaccatgcggccaacaaagttgtgcaagatttggtatggtgccttgatacacctgctcttcctttcctacaatgggaagagcttatgtctgttttagcaactagacttccaagacgtcttaagagcgagttggagggcaaatacaatgaatacaagttaaatgttgaccatgtgaagatcaaggatttccctaccgagatgcttagagagacaatcgaggaaaatcttgcatgtgtttccgagaaggaaatggtgacaattgagaggcttgttgaccctctgatgagcctgctgaagtcatacgagggtgggagagaaagccatgcccactttattgtcaagtccctttttgaggagtatctctcggttgaggaactattcagtgatggcattcagtctgacgtgattgaacgcctgcgcctacaatatagtaaagacctccagaaggttgtagacattgttttgtctcaccagggtgtgagaaacaaaacaaagctgatactcgcgctcatggagaaactggtctatccaaaccctgctgcctacagagatcagttgattcgcttttcttccctcaaccataaaagatattataagttggctcttaaagctagtgaacttcttgaacaaaccaagctcagcgaactccgcacaagcattgcaaggaacctttcagcgctggatatgttcaccgaggaaaaggcagatttctccttgcaagacagaaaattggccattaatgagagcatgggagatttagtcactgccccactgccagttgaagatgcacttgtttctttgtttgattgtactgatcaaactcttcagcagagagtgattcagacatacatatctcgattataccagcctcaacttgtgaaggatagcatccagctgaaatatcaggattctggtgttattgctttatgggaattcactgaaggaaatcatgagaagagattgggtgctatggttatcctgaagtcactagaatctgtgtcaacagccattggagctgctctaaaggatgcatcacattatgcaagctctgcgggcaacacggtgcatattgctttgttggatgctgatacccaactgaatacaactgaagatagtggtgataatgaccaagctcaagacaagatggataaactttcttttgtactgaaacaagatgttgtcatggctgatctacgtgctgctgatgtcaaggttgttagttgcattgttcaaagagatggagcaatcatgcctatgcgccgtaccttcctcttgtcagaggaaaaactttgttacgaggaagagccgattcttcggcatgtggagcctccactttctgcacttcttgagttggataaattgaaagtgaaaggatacaatgagatgaagtatacaccgtcacgtgatcgtcagtggcatatatacacacttagaaatactgaaaatccaaaaatgctgcacagggtatttttccgaacacttgtcagacaacccagtgcaggcaacaggtttacatcagaccatatcactgatgttgaagtaggacacgcagaggaacctctttcatttacttcaagcagcatattaaaatcgttgaagattgctaaagaagaattggagcttcacgcgatcaggactggccattctcatatgtacttgtgcatattgaaagagcaaaagcttcttgaccttgttcctgtttcagggaacactgttgtggatgttggtcaagatgaagctactgcatgctctcttttgaaagaaatggctttaaagatacatgaacttgttggtgcaagaatgcatcatctttctgtatgccagtgggaagtgaaacttaagttggtgagcgatgggcctgccagtggtagctggagagttgtaacaaccaatgttactggtcacacctgcactgtggatatctaccgggaggtcgaagatacagaatcacagaaactagtataccactccaccgcattgtcatctggtcctttgcatggtgttgcactgaatacttcgtatcagcctttgagtgttattgatttaaaacgttgctctgccaggaacaacaaaactacatactgctatgattttccattgacatttgaagctgcagtgcagaagtcgtggtctaacatttccagtgaaaacaaccaatgttatgttaaagcgacagagcttgtgtttgctgaaaagaatgggtcgtggggcactcctataattcctatgcagcgtgctgctgggctgaatgacattggtatggtagcctggatcttggacatgtccactcctgaatttcccagcggcagacagatcattgttatcgcaaatgatattacatttagagctggatcatttggcccaagggaagatgcatttttcgaagctgtaaccaacctggcttgtgagaagaagcttccacttatctacttggctgcaaactctggtgctcggattggcattgctgatgaagtaaaatcttgcttccgtgttggatggactgatgatagcagccctgaacgtggatttaggtacatttatatgactgacgaagaccatgatcgtattggctcttcagttatagcacacaagatgcagctagatagtggcgagatcaggtgggttattgattctgttgtgggaaaagaggatggactaggtgtggagaacatacatggaagtgctgctattgccagtgcctattctagggcgtacgaggagacatttacacttacattcgttactggacgaactgttggaatcggagcctatcttgctcgacttggcatacggtgcatacagcgtattgaccagcccattattttgaccgggttttctgccctgaacaagcttcttgggcgggaggtgtacagctcccacatgcagttgggtggtcccaaaatcatggcgacgaatggtgttgtccatctgactgttccagatgaccttgaaggtgtttctaatatattgaggtggctcagctatgttcctgcaaacattggtggacctcttcctattacaaaatctttggacccaatagacagacccgttgcatacatccctgagaatacatgtgatcctcgtgcagccatcagtggcattgatgacagccaagggaaatggttgggtggcatgtttgacaaagacagttttgtggagacatttgaaggatgggcgaagacagtagttactggcagagcaaaacttggagggattcctgttggtgttatagctgtggagacacagaccatgatgcagctcgtccccgctgatccaggccagcctgattcccacgagcggtctgttcctcgtgctgggcaagtttggtttccagattctgctaccaagacagcgcaggcgatgttggacttcaaccgtgaaggattacctctgttcatacttgctaactggagaggcttctctggagggcaaagagatctttttgaaggaattctgcaggctgggtcaacaattgttgagaaccttaggacatacaatcagcctgcctttgtatatatccccaaggctgcagagctacgtggaggagcctgggtcgtgattgatagcaagataaacccagatcgcatcgagtgctatgctgagaggactgcaaagggtaatgttctcgaacctcaagggttgattgagatcaagttcaggtcagaggaactcaaagaatgcatgggtaggcttgatccagaattgatagatctgaaagcaagactccagggagcaaatggaagcctatctgatggagaatcccttcagaagagcatagaagctcggaagaaacagttgctgcctctgtacacccaaatcgcggtacgttttgcggaattgcacgacacttcccttagaatggctgctaaaggtgtgatcaggaaagttgtagactgggaagactctcggtctttcttctacaagagattacggaggaggctatccgaggacgttctggcaaaggagattagaggtgtaattggtgagaagtttcctcacaaatcagcgatcgagctgatcaagaaatggtacttggcttctgaggcagctgcagcaggaagcaccgactgggatgacgacgatgcttttgtcgcctggagggagaaccctgaaaactataaggagtatatcaaagagcttagggctcaaagggtatctcggttgctctcagatgttgcaggctccagttcggatttacaagccttgccgcagggtctttccatgctactagataagatggatccctctaagagagcacagtttatcgaggaggtcatgaaggtcctgaaatgatcaaatgataccaacacatccaatacagtatgtgcatgatatctgtttctcttgaagtacatatatagatggatacaaggcggctgtaactgatggtagctaatctgggccaaccattacttttgtgaacttgctggtggcctttattattcaaggcacagctcgccttcggaccccctccggctggttgatgatgagtgtaactggatgtgttagttctgctgccacagaattcgagaaggataggggcatgcgggttttgcctcctgttggcaagaacactggtgattttgagttcttgttatgtggactgtggtagtcttgtttcgctgtagttctgtgatgttctatctcctgtaattctagtcttgggagagtgattcagatgtccattcaattttgaacttgaataataatatgctttgtaggcctatgcgtaccagtatgtggaataaatgttcgttgagtta

SEQ ID NO: 2 - protein, 2320 aa, Alopecurus myosuroides
MGSTHLPIVGFNASTTPSLSTLRQINSAAAAFQSSSPSRSSKKKSRRVKSIRDDGDGSVPDPAGHGQSIRQGLAGIIDLPKEGASAPDVDISHGSEDHKASYQMNGILNESHNGRHASLSKVYEFCTELGGKTPIHSVLVANNGMAAAKFMRSVRTWANDTFGSEKAIQLIAMATPEDMRINAEHIRIADQFVEVPGGTNNNNYANVQLIVEIAERTGVSAVWPGWGHASENPELPDALTAKGIVFLGPPASSMNALGDKVGSALIAQAAGVPTLAWSGSHVEIPLELCLDSIPEEMYRKACVTTADEAVASCQMIGYPAMIKASWGGGGKGIRKVNNDDEVKALFKQVQGEVPGSPIFIMRLASQSRHLEVQLLCDEYGNVAALHSRDCSVQRRHQKIIEEGPVTVAPRETVKELEQAARRLAKAVGYVGAATVEYLYSMETGEYYFLELNPRLQVEHPVTESIAEVNLPAAQVAVGMGIPLWQIPEIRRFYGMDNGGGYDIWRKTAALATPFNFDEVDSQWPKGHCVAVRITSENPDDGFKPTGGKVKEISFKSKPNVWGYFSVKSGGGIHEFADSQFGHVFAYGETRSAAITSMSLALKEIQIRGEIHTNVDYTVDLLNAPDFRENTIHTGWLDTRIAMRVQAERPPWYISVVGGALYKTITTNAETVSEYVSYLIKGQIPPKHISLVHSTISLNIEESKYTIEIVRSGQGSYRLRLNGSLIEANVQTLCDGGLLMQLDGNSHVIYAEEEAGGTRLLIDGKTCLLQNDHDPSRLLAETPCKLLRFLIADGAHVDADVPYAEVEVMKMCMPLLSPAAGVINVLLSEGQAMQAGDLIARLDLDDPSAVKRAEPFEGSFPEMSLPIAASGQVHKRCAASLNAARMVLAGYDHAANKVVQDLVWCLDTPALPFLQWEELMSVLATRLPRRLKSELEGKYNEYKLNVDHVKIKDFPTEMLRETIEENLACVSEKEMVTIERLVDPLMSLLKSYEGGRESHAHFIVKSLFEEYLSVEELFSDGIQSDVIERLRLQYSKDLQKVVDIVLSHQGVRNKTKLILALMEKLVYPNPAAYRDQLIRFSSLNHKRYYKLALKASELLEQTKLSELRTSIARNLSALDMFTEEKADFSLQDRKLAINESMGDLVTAPLPVEDALVSLFDCTDQTLQQRVIQTYISRLYQPQLVKDSIQLKYQDSGVIALWEFTEGNHEKRLGAMVILKSLESVSTAIGAALKDASHYASSAGNTVHIALLDADTQLNTTEDSGDNDQAQDKMDKLSFVLKQDVVMADLRAADVKVVSCIVQRDGAIMPMRRTFLLSEEKLCYEEEPILRHVEPPLSALLELDKLKVKGYNEMKYTPSRDRQWHIYTLRNTENPKMLHRVFFRTLVRQPSAGNRFTSDHITDVEVGHAEEPLSFTSSSILKSLKIAKEELELHAIRTGHSHMYLCILKEQKLLDLVPVSGNTVVDVGQDEATACSLLKEMALKIHELVGARMHHLSVCQWEVKLKLVSDGPASGSWRVVTTNVTGHTCTVDIYREVEDTESQKLVYHSTALSSGPLHGVALNTSYQPLSVIDLKRCSARNNKTTYCYDFPLTFEAAVQKSWSNISSENNQCYVKATELVFAEKNGSWGTPIIPMQRAAGLNDIGMVAWILDMSTPEFPSGRQIIVIANDITFRAGSFGPREDAFFEAVTNLACEKKLPLIYLAANSGARIGIADEVKSCFRVGWTDDSSPERGFRYIYMTDEDHDRIGSSVIAHKMQLDSGEIRWVIDSVVGKEDGLGVENIHGSAAIASAYSRAYEETFTLTFVTGRTVGIGAYLARLGIRCIQRIDQPIILTGFSALNKLLGREVYSSHMQLGGPKIMATNGVVHLTVPDDLEGVSNILRWLSYVPANIGGPLPITKSLDPIDRPVAYIPENTCDPRAAISGIDDSQGKWLGGMFDKDSFVETFEGWAKTVVTGRAKLGGIPVGVIAVETQTMMQLVPADPGQPDSHERSVPRAGQVWFPDSATKTAQAMLDFNREGLPLFILANWRGFSGGQRDLFEGILQAGSTIVENLRTYNQPAFVYIPKAAELRGGAWVVIDSKINPDRIECYAERTAKGNVLEPQGLIEIKFRSEELKECMGRLDPELIDLKARLQGANGSLSDGESLQKSIEARKKQLLPLYTQIAVRFAELHDTSLRMAAKGVIRKVVDWEDSRSFFYKRLRRRLSEDVLAKEIRGVIGEKFPHKSAIELIKKWYLASEAAAAGSTDWDDDDAFVAWRENPENYKEYIKELRAQRVSRLLSDVAGSSSDLQALPQGLSMLLDKMDPSKRAQFIEEVMKVLK

SEQ ID NO: 3 - DNA, 7425 bp, Oryza sativa
  source 1..7425: mol_type = genomic DNA
atgacatccacacatgtggcgacattgggagttggtgcccaggcacctcctcgtcaccagaaaaagtcagctggcactgcatttgtatcatctgggtcatcaagaccctcataccgaaagaatggtcagcgtactcggtcacttagggaagaaagcaatggaggagtgtctgattccaaaaagcttaaccactctattcgccaaggtcttgctggcatcattgacctcccaaatgacgcagcttcagaagttgatatttcacatggttccgaagatcccagggggcctacggtcccaggttcctaccaaatgaatgggattatcaatgaaacacataatgggaggcatgcttcagtctccaaggttgttgagttttgtacggcacttggtggcaaaacaccaattcacagtgtattagtggccaacaatggaatggcagcagctaagttcatgcggagtgtccgaacatgggctaatgatacttttggatcagagaaggcaattcagctgatagctatggcaactccggaggatctgaggataaatgcagagcacatcagaattgccgatcaatttgtagaggtacctggtggaacaaacaacaacaactatgcaaatgtccaactcatagtggagatagcagagagaacaggtgtttctgctgtttggcctggttggggtcatgcatctgagaatcctgaacttccagatgcgctgactgcaaaaggaattgtttttcttgggccaccagcatcatcaatgcatgcattaggagacaaggttggctcagctctcattgctcaagcagctggagttccaacacttgcttggagtggatcacatgtggaagttcctctggagtgttgcttggactcaatacctgatgagatgtatagaaaagcttgtgttactaccacagaggaagcagttgcaagttgtcaggtggttggttatcctgccatgattaaggcatcttggggtggtggtggtaaaggaataaggaaggttcataatgatgatgaggttaggacattatttaagcaagttcaaggcgaagtacctggttccccaatatttatcatgaggctagctgctcagagtcgacatcttgaagttcagttgctttgtgatcaatatggcaacgtagcagcacttcacagtcgagattgcagtgtacaacggcgacaccaaaagataatcgaggaaggaccagttactgttgctcctcgtgagactgtgaaagagcttgagcaggcagcacggaggcttgctaaagctgtgggttatgttggtgctgctactgttgaatacctttacagcatggaaactggtgaatattattttctggaacttaatccacggctacaggttgagcatcctgtcactgagtggatagctgaagtaaatttgcctgcggctcaagttgctgttggaatgggtatacccctttggcagattccagagatcaggcgcttctacggaatgaaccatggaggaggctatgacctttggaggaaaacagcagctctagcgactccatttaactttgatgaagtagattctaaatggccaaaaggccactgcgtagctgttagaataactagcgaggatccagatgatgggtttaagcctactggtggaaaagtaaaggagataagtttcaagagtaaaccaaatgtttgggcctatttctcagtaaagtctggtggaggcatccatgaattcgctgattctcagttcggacatgtttttgcgtatggaactactagatcggcagcaataactaccatggctcttgcactaaaagaggttcaaattcgtggagaaattcattcaaacgtagactacacagttgacctattaaatgcctcagattttagagaaaataagattcatactggttggctggataccaggatagccatgcgtgttcaagctgagaggcctccatggtatatttcagtcgttggaggggctttatataaaacagtaactgccaacacggccactgtttctgattatgttggttatcttaccaagggccagattccaccaaagcatatatcccttgtctatacgactgttgctttgaatatagatgggaaaaaatatacaatcgatactgtgaggagtggacatggtagctacagattgcgaatgaatggatcaacggttgacgcaaatgtacaaatattatgtgatggtgggcttttaatgcagctggatggaaacagccatgtaatttatgctgaagaagaggccagtggtacacgacttcttattgatggaaagacatgcatgttacagaatgaccatgacccatcaaagttattagctgagacaccatgcaaacttcttcgtttcttggttgctgatggtgctcatgttgatgctgatgtaccatatgcggaagttgaggttatgaagatgtgcatgcccctcttatcacccgcttctggtgtcatacatgttgtaatgtctgagggccaagcaatgcaggctggtgatcttatagctaggctggatcttgatgacccttctgctgttaagagagctgagccgttcgaagatacttttccacaaatgggtctccctattgctgcttctggccaagttcacaaattatgtgctgcaagtctgaatgcttgtcgaatgatccttgcggggtatgagcatgatattgacaaggttgtgccagagttggtatactgcctagacactccggagcttcctttcctgcagtgggaggagcttatgtctgttttagcaactagacttccaagaaatcttaaaagtgagttggagggcaaatatgaggaatacaaagtaaaatttgactctgggataatcaatgatttccctgccaatatgctacgagtgataattgaggaaaatcttgcatgtggttctgagaaggagaaggctacaaatgagaggcttgttgagcctcttatgagcctactgaagtcatatgagggtgggagagaaagtcatgctcactttgttgtcaagtccctttttgaggagtatctctatgttgaagaattgttcagtgatggaattcagtctgatgtgattgagcgtctgcgccttcaacatagtaaagacctacagaaggtcgtagacattgtgttgtcccaccagagtgttagaaataaaactaagctgatactaaaactcatggagagtctggtctatccaaatcctgctgcctacagggatcaattgattcgcttttcttcccttaatcacaaagcgtattacaagttggcacttaaagctagtgaacttcttgaacaaacaaaacttagtgagctccgtgcaagaatagcaaggagcctttcagagctggagatgtttactgaggaaagcaagggtctctccatgcataagcgagaaattgccattaaggagagcatggaagatttagtcactgctccactgccagttgaagatgcgctcatttctttatttgattgtagtgatacaactgttcaacagagagtgattgagacttatatagctcgattataccagcctcatcttgtaaaggacagtatcaaaatgaaatggatagaatcgggtgttattgctttatgggaatttcctgaagggcattttgatgcaagaaatggaggagcggttcttggtgacaaaagatggggtgccatggtcattgtcaagtctcttgaatcactttcaatggccattagatttgcactaaaggagacatcacactacactagctctgagggcaatatgatgcatattgctttgttgggtgctgataataagatgcatataattcaagaaagtggtgatgatgctgacagaatagccaaacttcccttgatactaaaggataatgtaaccgatctgcatgcctctggtgtgaaaacaataagtttcattgttcaaagagatgaagcacggatgacaatgcgtcgtaccttcctttggtctgatgaaaagctttcttatgaggaagagccaattctccggcatgtggaacctcctctttctgcacttcttgagttggacaagttgaaagtgaaaggatacaatgaaatgaagtataccccatcacgggatcgtcaatggcatatctacacacttagaaatactgaaaaccccaaaatgttgcaccgggtatttttccgaacccttgtcaggcaacccagtgtatccaacaagttttcttcgggccagattggtgacatggaagttgggagtgctgaagaacctctgtcatttacatcaaccagcatattaagatctttgatgactgctatagaggaattggagcttcacgcaattagaactggccattcacacatgtatttgcatgtattgaaagaacaaaagcttcttgatcttgttccagtttcagggaatacagttttggatgttggtcaagatgaagctactgcatattcacttttaaaagaaatggctatgaagatacatgaacttgttggtgcaagaatgcaccatctttctgtatgccaatgggaagtgaaacttaagttggactgcgatggtcctgccagtggtacctggaggattgtaacaaccaatgttactagtcacacttgcactgtggatatctaccgtgagatggaagataaagaatcacggaagttagtataccatcccgccactccggcggctggtcctctgcatggtgtggcactgaataatccatatcagcctttgagtgtcattgatctcaaacgctgttctgctaggaataatagaactacatactgctatgattttccactggcatttgaaactgcagtgaggaagtcatggtcctctagtacctctggtgcttctaaaggtgttgaaaatgcccaatgttatgttaaagctacagagttggtatttgcggacaaacatgggtcatggggcactcctttagttcaaatggaccggcctgctgggctcaatgacattggtatggtagcttggaccttgaagatgtccactcctgaatttcctagtggtagggagattattgttgttgcaaatgatattacgttcagagctggatcatttggcccaagggaagatgcattttttgaagctgttaccaacctagcctgtgagaagaaacttcctcttatttatttggcagcaaattctggtgctcgaattggcatagcagatgaagtgaaatcttgcttccgtgttgggtggtctgatgatggcagccctgaacgtgggtttcagtacatttatctaagcgaagaagactatgctcgtattggcacttctgtcatagcacataagatgcagctagacagtggtgaaattaggtgggttattgattctgttgtgggcaaggaagatggacttggtgtggagaatatacatggaagtgctgctattgccagtgcttattctagggcatataaggagacatttacacttacatttgtgactggaagaactgttggaataggagcttatcttgctcgacttggcatccggtgcatacagcgtcttgaccagcctattattcttacaggctattctgcactgaacaagcttcttgggcgggaagtgtacagctcccacatgcagttgggtggtcccaaaatcatggcaactaatggtgttgtccatcttactgtttcagatgaccttgaaggcgtttctaatatattgaggtggctcagttatgttcctgcctacattggtggaccacttccagtaacaacaccgttggacccaccggacagacctgttgcatacattcctgagaactcgtgtgatcctcgagcggctatccgtggtgttgatgacagccaagggaaatggttaggtggtatgtttgataaagacagctttgtggaaacatttgaaggttgggctaagacagtggttactggcagagcaaagcttggtggaattccagtgggtgtgatagctgtggagactcagaccatgatgcaaactatccctgctgaccctggtcagcttgattcccgtgagcaatctgttcctcgtgctggacaagtgtggtttccagattctgcaaccaagactgcgcaggcattgctggacttcaaccgtgaaggattacctctgttcatcctcgctaactggagaggcttctctggtggacaaagagatctttttgaaggaattcttcaggctggctcgactattgttgagaaccttaggacatacaatcagcctgcctttgtctacattcccatggctgcagagctacgaggaggggcttgggttgtggttgatagcaagataaacccagaccgcattgagtgctatgctgagaggactgcaaaaggcaatgttctggaaccgcaagggttaattgagatcaagttcaggtcagaggaactccaggattgcatgagtcggcttgacccaacattaattgatctgaaagcaaaactcgaagtagcaaataaaaatggaagtgctgacacaaaatcgcttcaagaaaatatagaagctcgaacaaaacagttgatgcctctatatactcagattgcgatacggtttgctgaattgcatgatacatccctcagaatggctgcgaaaggtgtgattaagaaagttgtggactgggaagaatcacgatctttcttctataagagattacggaggaggatctctgaggatgttcttgcaaaagaaattagagctgtagcaggtgagcagttttcccaccaaccagcaatcgagctgatcaagaaatggtattcagcttcacatgcagctgaatgggatgatgacgatgcttttgttgcttggatggataaccctgaaaactacaaggattatattcaatatcttaaggctcaaagagtatcccaatccctctcaagtctttcagattccagctcagatttgcaagccctgccacagggtctttccatgttactagataagatggatccctctagaagagctcaacttgttgaagaaatcaggaaggtccttggttgaatcatatgatgccaaaactattattggaggcacaaatagcttgtggaccctgtcggattgttggtgagtgtatattggatttgttagttctgccagatgaaagtgcaagtctgatgattcatgataccgtcagttggcaagaacaccggttaacctgagtgcttgtttacaaatggtcctttatgacaatcgttgtttcgcgctagttccgtgatctactatcatctgttagacgctgtaattagtgagtctccgcggatccacagtatacggttgagctgttgattcaattttggacacgaataatatgattttgtaggcataaatgcgtctgtatgtgaaataaattgtctgttgagttaacacacaagatgacaatatgtttgtgctctactgctattgtccatgaatactgattgcggaatcaaccacatgcattat

SEQ ID NO: 4 - protein, 2327 aa, Oryza sativa
MTSTHVATLGVGAQAPPRHQKKSAGTAFVSSGSSRPSYRKNGQRTRSLREESNGGVSDSKKLNHSIRQGLAGIIDLPNDAASEVDISHGSEDPRGPTVPGSYQMNGIINETHNGRHASVSKVVEFCTALGGKTPIHSVLVANNGMAAAKFMRSVRTWANDTFGSEKAIQLIAMATPEDLRINAEHIRIADQFVEVPGGTNNNNYANVQLIVEIAERTGVSAVWPGWGHASENPELPDALTAKGIVFLGPPASSMHALGDKVGSALIAQAAGVPTLAWSGSHVEVPLECCLDSIPDEMYRKACVTTTEEAVASCQVVGYPAMIKASWGGGGKGIRKVHNDDEVRTLFKQVQGEVPGSPIFIMRLAAQSRHLEVQLLCDQYGNVAALHSRDCSVQRRHQKIIEEGPVTVAPRETVKELEQAARRLAKAVGYVGAATVEYLYSMETGEYYFLELNPRLQVEHPVTEWIAEVNLPAAQVAVGMGIPLWQIPEIRRFYGMNHGGGYDLWRKTAALATPFNFDEVDSKWPKGHCVAVRITSEDPDDGFKPTGGKVKEISFKSKPNVWAYFSVKSGGGIHEFADSQFGHVFAYGTTRSAAITTMALALKEVQIRGEIHSNVDYTVDLLNASDFRENKIHTGWLDTRIAMRVQAERPPWYISVVGGALYKTVTANTATVSDYVGYLTKGQIPPKHISLVYTTVALNIDGKKYTIDTVRSGHGSYRLRMNGSTVDANVQILCDGGLLMQLDGNSHVIYAEEEASGTRLLIDGKTCMLQNDHDPSKLLAETPCKLLRFLVADGAHVDADVPYAEVEVMKMCMPLLSPASGVIHVVMSEGQAMQAGDLIARLDLDDPSAVKRAEPFEDTFPQMGLPIAASGQVHKLCAASLNACRMILAGYEHDIDKVVPELVYCLDTPELPFLQWEELMSVLATRLPRNLKSELEGKYEEYKVKFDSGIINDFPANMLRVIIEENLACGSEKEKATNERLVEPLMSLLKSYEGGRESHAHFVVKSLFEEYLYVEELFSDGIQSDVIERLRLQHSKDLQKVVDIVLSHQSVRNKTKLILKLMESLVYPNPAAYRDQLIRFSSLNHKAYYKLALKASELLEQTKLSELRARIARSLSELEMFTEESKGLSMHKREIAIKESMEDLVTAPLPVEDALISLFDCSDTTVQQRVIETYIARLYQPHLVKDSIKMKWIESGVIALWEFPEGHFDARNGGAVLGDKRWGAMVIVKSLESLSMAIRFALKETSHYTSSEGNMMHIALLGADNKMHIIQESGDDADRIAKLPLILKDNVTDLHASGVKTISFIVQRDEARMTMRRTFLWSDEKLSYEEEPILRHVEPPLSALLELDKLKVKGYNEMKYTPSRDRQWHIYTLRNTENPKMLHRVFFRTLVRQPSVSNKFSSGQIGDMEVGSAEEPLSFTSTSILRSLMTAIEELELHAIRTGHSHMYLHVLKEQKLLDLVPVSGNTVLDVGQDEATAYSLLKEMAMKIHELVGARMHHLSVCQWEVKLKLDCDGPASGTWRIVTTNVTSHTCTVDIYREMEDKESRKLVYHPATPAAGPLHGVALNNPYQPLSVIDLKRCSARNNRTTYCYDFPLAFETAVRKSWSSSTSGASKGVENAQCYVKATELVFADKHGSWGTPLVQMDRPAGLNDIGMVAWTLKMSTPEFPSGREIIVVANDITFRAGSFGPREDAFFEAVTNLACEKKLPLIYLAANSGARIGIADEVKSCFRVGWSDDGSPERGFQYIYLSEEDYARIGTSVIAHKMQLDSGEIRWVIDSVVGKEDGLGVENIHGSAAIASAYSRAYKETFTLTFVTGRTVGIGAYLARLGIRCIQRLDQPIILTGYSALNKLLGREVYSSHMQLGGPKIMATNGVVHLTVSDDLEGVSNILRWLSYVPAYIGGPLPVTTPLDPPDRPVAYIPENSCDPRAAIRGVDDSQGKWLGGMFDKDSFVETFEGWAKTVVTGRAKLGGIPVGVIAVETQTMMQTIPADPGQLDSREQSVPRAGQVWFPDSATKTAQALLDFNREGLPLFILANWRGFSGGQRDLFEGILQAGSTIVENLRTYNQPAFVYIPMAAELRGGAWVVVDSKINPDRIECYAERTAKGNVLEPQGLIEIKFRSEELQDCMSRLDPTLIDLKAKLEVANKNGSADTKSLQENIEARTKQLMPLYTQIAIRFAELHDTSLRMAAKGVIKKVVDWEESRSFFYKRLRRRISEDVLAKEIRAVAGEQFSHQPAIELIKKWYSASHAAEWDDDDAFVAWMDNPENYKDYIQYLKAQRVSQSLSSLSDSSSDLQALPQGLSMLLDKMDPSRRAQLVEEIRKVLG

SEQ ID NO: 5 - DNA, 12486 bp, Oryza sativa
  source 1..12486: mol_type = genomic DNA
tcattcttatatattttcatctgtcagatttcacacatctggggatttatcttctctttgtatggcactacacatttgagaaaccgtgcaattctactgtttggtcagcaggacaacaatgacatccacacatgtggcgacattgggagttggtgcccaggcacctcctcgtcaccagaaaaagtcagctggcactgcatttgtatcatctgggtcatcaagaccctcataccgaaagaatggtcagcgtactcggtcacttagggaagaaagcaatggaggagtgtctgattccaaaaagcttaaccactctattcgccaaggtgaccactagctactttacatatgctataatttgtgccaaacataaacatgcaatggctgctattatttaaacgttaatgttgaaatagctgctataggatacagcaaaaatatataattgactgggcaagatgcaacaattgtttttcactaaagttagttatcttttgctgtaaaagacaactgttttttacataaaatggtattaataaccttgtaatattcaatgcaacatgttctcaagtaaaaaaaaacattgcctggttgtataagcaaatgtgtcgttgtagacatcttattaaacctttttgtgatatctattaccgtagggaacaggggagctgtttaaatctgttatcatagagtaatatgagaaaagtggattgtgcgactttggcatgtatacctgctcaatttcaaatatatgtctatgtgcaggtcttgctggcatcattgacctcccaaatgacgcagcttcagaagttgatatttcacagtaaggactttatattttataataattattatataattttctgacatgttttgagaacctcaaaacatgtgattgcaccttccttttttatgtctggttcagaaactgataagttttgacagtgtttaggatggatctttgatgcgcacagtgctttctaatgttttcatttttgaaagtaatgttttaggaagaaatatctgattaaatttatactttatctttacaaaagtcaaatgcgttctgtatcaattgcggtttgtaatatggcaagaacatgctttcagaatttgttcatacaatgctttctttctattattatgtagaacaaatacctaatactttgttcaccttttatagtggacacctctcacagctttttcagtaagtgatgcaattttgtacatttgtaagatgtgttccagaaaccttttctcctgcaattctaatgtacccactcaaactggtatcaccaaagatctccatctgattgaaaaaaagctgcgtgaagtatgcttatttatgctaaccatacatgatttatactgttttatagtacaatgcttatttatgctaaccatacataattttattctgttttctagtacattatttgtgcccctgaccataaatgatcctttcttttacagtggttccgaagatcccagggggcctacggtcccaggttcctaccaaatgaatgggattatcaatgaaacacataatgggaggcatgcttcagtctccaaggttgttgagttttgtacggcacttggtggcaaaacaccaattcacagtgtattagtggccaacaatggaatggcagcagctaagttcatgcggagtgtccgaacatgggctaatgatacttttggatcagagaaggcaattcagctgatagctatggcaactccggaggatctgaggataaatgcagagcacatcagaattgccgatcaatttgtagaggtacctggtggaacaaacaacaacaactatgcaaatgtccaactcatagtggaggttagttcagctcatccctcaacacaacattttcgtttctatttaagttagggaaaaatctctacgaccctccaatttctgaacatccaattttcaccatcaactgcaatcacagatagcagagagaacaggtgtttctgctgtttggcctggttggggtcatgcatctgagaatcctgaacttccagatgcgctgactgcaaaaggaattgtttttcttgggccaccagcatcatcaatgcatgcattaggagacaaggttggctcagctctcattgctcaagcagctggagttccaacacttgcttggagtggatcacatgtgagccttgtcttctcttttttagcttatcatcttatcttttcggtgatgcattatcccaatgacactaaaccataggtggaagttcctctggagtgttgcttggactcaatacctgatgagatgtatagaaaagcttgtgttactaccacagaggaagcagttgcaagttgtcaggtggttggttatcctgccatgattaaggcatcttggggtggtggtggtaaaggaataaggaaggtttgttcttcttgtagttatcaagagattgtttggattgcaagtgtttagtgcccatagttaactctggtctttctaacatgagtaactcaactttcttgcaggttcataatgatgatgaggttaggacattatttaagcaagttcaaggcgaagtacctggttccccaatatttatcatgaggctagctgctcaggtggggccttttatggaagttacaccttttcccttaatgttgagttattccggagttattatggttatgttctgtatgtttgatctgtaaattattgaaattcacctccattggttctccagattagcagacctacaattctacatatggtttatactttataaatactaggatttagggatcttcatatagtttatacatggtatttagatttcatttgtaaccctattgaagacatcctgattgttgtcttatgtagagtcgacatcttgaagttcagttgctttgtgatcaatatggcaacgtagcagcacttcacagtcgagattgcagtgtacaacggcgacaccaaaaggtctgctgtctcagttaaatcacccctctgaatgatctacttcttgcctgctgcgttggtcagaggaataatggttgtattctactgaacagataatcgaggaaggaccagttactgttgctcctcgtgagactgtgaaagagcttgagcaggcagcacggaggcttgctaaagctgtgggttatgttggtgctgctactgttgaatacctttacagcatggaaactggtgaatattattttctggaacttaatccacggctacaggtcggctcctttgacattcttcaggaattaatttctgttgaccacatgatttacattgtcaaatggtctcacaggttgagcatcctgtcactgagtggatagctgaagtaaatttgcctgcggctcaagttgctgttggaatgggtatacccctttggcagattccaggtaatgcttcttcatttagttcctgctctttgttaattgaatgagctcttatacagaccatgagacacattctactgttaattcatagtatcccctgacttgttagtgttagagatacagagatgtatcacaaattcattgtatctcctcaaggactgtaaaaatcctataattaaatttctgaaaatttgttcttttaagcagaaaaaaaatctctaaattatctccctgtatacagagatcaggcgcttctacggaatgaaccatggaggaggctatgacctttggaggaaaacagcagctctagcgactccatttaactttgatgaagtagattctaaatggccaaaaggccactgcgtagctgttagaataactagcgaggatccagatgatgggtttaagcctactggtggaaaagtaaaggtgcggtttcctgatgttaggtgtatgaattgaacacattgctatattgcagctagtgaaatgactggatcatggttctcttattttcaggagataagtttcaagagtaaaccaaatgtttgggcctatttctcagtaaaggtagtcctcaatattgttgcactgccacattatttgagttgtcctaacaattgtgctgcaattgttagttttcaactatttgttgttctgtttggttgactggtaccctctctttgcagtctggtggaggcatccatgaattcgctgattctcagttcggtatgtaaagttaaaagagtaatattgtctttgctatttatgtttgtcctcacttttaaaagatattgccttccattacaggacatgtttttgcgtatggaactactagatcggcagcaataactaccatggctcttgcactaaaagaggttcaaattcgtggagaaattcattcaaacgtagactacacagttgacctattaaatgtaaggactaaatatctgcttattgaaccttgctttttggttccctaatgccattttagtctggctactgaagaacttatccatcatgccatttctgttatcttaaattcaggcctcagattttagagaaaataagattcatactggttggctggataccaggatagccatgcgtgttcaagctgagaggcctccatggtatatttcagtcgttggaggggctttatatgtaagacaaactatgccactcattagcatttatgtgaagcaaatgcggaaaacatgatcaatatgtcgtcttatttaaatttatttatttttgtgctgcagaaaacagtaactgccaacacggccactgtttctgattatgttggttatcttaccaagggccagattccaccaaaggtactattctgttttttcaggatatgaatgctgtttgaatgtgaaaaccattgaccataaatccttgtttgcagcatatatcccttgtctatacgactgttgctttgaatatagatgggaaaaaatatacagtaagtgtgacattcttaatggggaaacttaatttgttgtaaataatcaatatcatattgactcgtgtatgctgcatcatagatcgatactgtgaggagtggacatggtagctacagattgcgaatgaatggatcaacggttgacgcaaatgtacaaatattatgtgatggtgggcttttaatgcaggtaatatcttcttcctagttaaagaagatatatcttgttcaaagaattctgattattgatcttttaatgttttcagctggatggaaacagccatgtaatttatgctgaagaagaggccagtggtacacgacttcttattgatggaaagacatgcatgttacaggtaatgatagccttgttctttttagttctagtcacggtgtttgcttgctatttgttgtatctatttaatgcattcactaattactatattagtttgcatcatcaagttaaaatggaacttctttcttgcagaatgaccatgacccatcaaagttattagctgagacaccatgcaaacttcttcgtttcttggttgctgatggtgctcatgttgatgctgatgtaccatatgcggaagttgaggttatgaagatgtgcatgcccctcttatcacccgcttctggtgtcatacatgttgtaatgtctgagggccaagcaatgcaggtacattcctacattccattcattgtgctgtgctgacatgaacatttcaagtaaatacctgtaacttgtttattattctaggctggtgatcttatagctaggctggatcttgatgacccttctgctgttaagagagctgagccgttcgaagatacttttccacaaatgggtctccctattgctgcttctggccaagttcacaaattatgtgctgcaagtctgaatgcttgtcgaatgatccttgcggggtatgagcatgatattgacaaggtaaacatcatgtcctcttgttttttcttttgtttatcatgcattcttatgttcatcatgtcctctggcaaatctagattccgctgtcgtttcacacagatttttctcattctcataatggtgccaaacataaatatgctgctatattcatcaatgttttcactcgatttctaattttgcttttgagttttaaactttagtacaatccatatctaatctcctttggcaacagtgaatccattatatatatttttattaaactgctttctttttcaggttgtgccagagttggtatactgcctagacactccggagcttcctttcctgcagtgggaggagcttatgtctgttttagcaactagacttccaagaaatcttaaaagtgaggtatattatggttgacaagatagctagtctcatgctctaaggacttgtacatttcgccacataggttaattttccatatcaagttctaatgtacgatataaaagtagtactggcctaaaacagtattggtggttgactatctttgttgtgtaagatcaagtatttctttttcatgcttagtttgtcaatacttcacatttatcactgacttgtcgagctaaatgagattttatttgatttctgtgctccattatttttgtatatatatatatatatttaactatgactatatgttatgcctcaaacgtttcaaactctttcagttggagggcaaatatgaggaatacaaagtaaaatttgactctgggataatcaatgatttccctgccaatatgctacgagtgataattgaggtcagttattcaatttgttgtgataatcactgccttaactgttcgttcttttaacaagcggttttataggaaaatcttgcatgtggttctgagaaggagaaggctacaaatgagaggcttgttgagcctcttatgagcctactgaagtcatatgagggtgggagagaaagtcatgctcactttgttgtcaagtccctttttgaggagtatctctatgttgaagaattgttcagtgatggaattcaggttaacttacctattcgcattaaacaaatcatcagttgttttatgataaagtcaaaatgtttatatttcccattcttctgtggatcaaatatatcacggacatgatatagtttccttaggctatataatggttcttcatcaaataatattgcaggaaacagtatagcaaactatttgtatatactcgagatggaaattgttagaaacatcattgactaaatctgtcctttgttacgctgtttttgtagtctgatgtgattgagcgtctgcgccttcaacatagtaaagacctacagaaggtcgtagacattgtgttgtcccaccaggtaaatttcttcatggtctgatgacttcactgcgaatggttactgaactgtcttcttgttctgacaatgtgacttttctttgtagagtgttagaaataaaactaagctgatactaaaactcatggagagtctggtctatccaaatcctgctgcctacagggatcaattgattcgcttttcttcccttaatcacaaagcgtattacaaggtgaccaggataaacataaataaacgtgaatttttcaatgaccttttcttctgacatctgaatctgatgaatttcttgcatattaatacagttggcacttaaagctagtgaacttcttgaacaaacaaaacttagtgagctccgtgcaagaatagcaaggagcctttcagagctggagatgtttactgaggaaagcaagggtctctccatgcataagcgagaaattgccattaaggagagcatggaagatttagtcactgctccactgccagttgaagatgcgctcatttctttatttgattgtagtgatacaactgttcaacagagagtgattgagacttatatagctcgattataccaggtatgagaagaaagaccttttgaaattatttatattaacatatcctagtaaaacagcatgctcatcatttcttaaaaaaagtttacagcacctgatgtttggttactgaccgcatcattaaaataaagttacttgttgtggagagatgtattttggaacttgtggcacatgcagtaacatgctactgctcgatatgtttgctaacttgacaacaatatttttcagcctcatcttgtaaaggacagtatcaaaatgaaatggatagaatcgggtgttattgctttatgggaatttcctgaagggcattttgatgcaagaaatggaggagcggttcttggtgacaaaagatggggtgccatggtcattgtcaagtctcttgaatcactttcaatggccattagatttgcactaaaggagacatcacactacactagctctgagggcaatatgatgcatattgctttgttgggtgctgataataagatgcatataattcaagaaaggtatgttcatatgctatgttggtgctgaaatagttatatatgtagttagctggtggagttctggtaattaacctatcccattgttcagtggtgatgatgctgacagaatagccaaacttcccttgatactaaaggataatgtaaccgatctgcatgcctctggtgtgaaaacaataagtttcattgttcaaagagatgaagcacggatgacaatgcgtcgtaccttcctttggtctgatgaaaagctttcttatgaggaagagccaattctccggcatgtggaacctcctctttctgcacttcttgagttggtacgtgatatcatcaaaatgataatgttttggtatggcattgattatcttctatgctctttgtatttattcagcctattgtggatacaggacaagttgaaagtgaaaggatacaatgaaatgaagtataccccatcacgggatcgtcaatggcatatctacacacttagaaatactgaaaaccccaaaatgttgcaccgggtatttttccgaacccttgtcaggcaacccagtgtatccaacaagttttcttcgggccagattggtgacatggaagttgggagtgctgaagaacctctgtcatttacatcaaccagcatattaagatctttgatgactgctatagaggaattggagcttcacgcaattagaactggccattcacacatgtatttgcatgtattgaaagaacaaaagcttcttgatcttgttccagtttcagggtaagtgcgcatatttctttttgggaacatatgcttgcttatgaggttggtcttctcaatgatcttcttatcttactcaggaatacagttttggatgttggtcaagatgaagctactgcatattcacttttaaaagaaatggctatgaagatacatgaacttgttggtgcaagaatgcaccatctttctgtatgccaatgggaagtgaaacttaagttggactgcgatggtcctgccagtggtacctggaggattgtaacaaccaatgttactagtcacacttgcactgtggatgtaagtttaatcctctagcattttgttttctttggaaaagcatgtgattttaagccggctggtcctcatacccagacctagtgatctttatatagtgtagacatttttctaactgcttttaattgttttagatctaccgtgagatggaagataaagaatcacggaagttagtataccatcccgccactccggcggctggtcctctgcatggtgtggcactgaataatccatatcagcctttgagtgtcattgatctcaaacgctgttctgctaggaataatagaactacatactgctatgattttccactggtgagttgactgctcccttatattcaatgcattaccatagcaaattcatattcgttcatgttgtcaaaataagccgatgaaaattcaaaactgtaggcatttgaaactgcagtgaggaagtcatggtcctctagtacctctggtgcttctaaaggtgttgaaaatgcccaatgttatgttaaagctacagagttggtatttgcggacaaacatgggtcatggggcactcctttagttcaaatggaccggcctgctgggctcaatgacattggtatggtagcttggaccttgaagatgtccactcctgaatttcctagtggtagggagattattgttgttgcaaatgatattacgttcagagctggatcatttggcccaagggaagatgcattttttgaagctgttaccaacctagcctgtgagaagaaacttcctcttatttatttggcagcaaattctggtgctcgaattggcatagcagatgaagtgaaatcttgcttccgtgttgggtggtctgatgatggcagccctgaacgtgggtttcagtacatttatctaagcgaagaagactatgctcgtattggcacttctgtcatagcacataagatgcagctagacagtggtgaaattaggtgggttattgattctgttgtgggcaaggaagatggacttggtgtggagaatatacatggaagtgctgctattgccagtgcttattctagggcatataaggagacatttacacttacatttgtgactggaagaactgttggaataggagcttatcttgctcgacttggcatccggtgcatacagcgtcttgaccagcctattattcttacaggctattctgcactgaacaagcttcttgggcgggaagtgtacagctcccacatgcagttgggtggtcccaaaatcatggcaactaatggtgttgtccatcttactgtttcagatgaccttgaaggcgtttctaatatattgaggtggctcagttatgttcctgcctacattggtggaccacttccagtaacaacaccgttggacccaccggacagacctgttgcatacattcctgagaactcgtgtgatcctcgagcggctatccgtggtgttgatgacagccaagggaaatggttaggtggtatgtttgataaagacagctttgtggaaacatttgaaggttgggctaagacagtggttactggcagagcaaagcttggtggaattccagtgggtgtgatagctgtggagactcagaccatgatgcaaactatccctgctgaccctggtcagcttgattcccgtgagcaatctgttcctcgtgctggacaagtgtggtttccagattctgcaaccaagactgcgcaggcattgctggacttcaaccgtgaaggattacctctgttcatcctcgctaactggagaggcttctctggtggacaaagagatctttttgaaggaattcttcaggctggctcgactattgttgagaaccttaggacatacaatcagcctgcctttgtctacattcccatggctgcagagctacgaggaggggcttgggttgtggttgatagcaagataaacccagaccgcattgagtgctatgctgagaggactgcaaaaggcaatgttctggaaccgcaagggttaattgagatcaagttcaggtcagaggaactccaggattgcatgagtcggcttgacccaacattaattgatctgaaagcaaaactcgaagtagcaaataaaaatggaagtgctgacacaaaatcgcttcaagaaaatatagaagctcgaacaaaacagttgatgcctctatatactcagattgcgatacggtttgctgaattgcatgatacatccctcagaatggctgcgaaaggtgtgattaagaaagttgtggactgggaagaatcacgatctttcttctataagagattacggaggaggatctctgaggatgttcttgcaaaagaaattagagctgtagcaggtgagcagttttcccaccaaccagcaatcgagctgatcaagaaatggtattcagcttcacatgcagctgaatgggatgatgacgatgcttttgttgcttggatggataaccctgaaaactacaaggattatattcaatatcttaaggctcaaagagtatcccaatccctctcaagtctttcagattccagctcagatttgcaagccctgccacagggtctttccatgttactagataaggtaattagcttactgatgcttatataaattctttttcattacatatggctggagaactatctaatcaaataatgattataattccaatcgttctttttatgccattatgatcttctgaaatttccttctttggacacttattcagatggatccctctagaagagctcaacttgttgaagaaatcaggaaggtccttggttgaatcatatgatgccaaaactattattggaggcacaaatagcttgtggaccctgtcggattgttggtgagtgtatattggatttgttagttctgccagatgaaagtgcaagtctgatgattcatgataccgtcagttggcaagaacaccggttaacctgagtgcttgtttacaaatggtcctttatgacaatcgttgtttcgcgctagttccgtgatctactatcatctgttagacgctgtaattagtgagtctccgcggatccacagtatacggttgagctgttgattcaattttggacacgaataatatgattttgtaggcataaatgcgtctgtatgtgaaataaattgtctgttgagttaacacacaagatgacaatatgtttgtgctctactgctattgtccatgaatactgattgcggaatcaaccacatgcattat

SEQ ID NO: 6 - protein, 2314 aa, Oryza sativa
MTSTHVATLGVGAQAPPRHQKKSAGTAFVSSGSSRPSYRKNGQRTRSLREESNGGVSDSKKLNHSIRQGLAGIIDLPNDAASEVDISHGSEDPRGPTVPGSYQMNGIINETHNGRHASVSKVVEFCTALGGKTPIHSVLVANNGMAAAKFMRSVRTWANDTFGSEKAIQLIAMATPEDLRINAEHIRIADQFVEVPGGTNNNNYANVQLIVEIAERTGVSAVWPGWGHASENPELPDALTAKGIVFLGPPASSMHALGDKVGSALIAQAAGVPTLAWSGSHVEVPLECCLDSIPDEMYRKACVTTTEEAVASCQVVGYPAMIKASWGGGGKGIRKVHNDDEVRTLFKQVQGEVPGSPIFIMRLAAQSRHLEVQLLCDQYGNVAALHSRDCSVQRRHQKIIEEGPVTVAPRETVKELEQAARRLAKAVGYVGAATVEYLYSMETGEYYFLELNPRLQVEHPVTEWIAEVNLPAAQVAVGMGIPLWQIPEIRRFYGMNHGGGYDLWRKTAALATPFNFDEVDSKWPKGHCVAVRITSEDPDDGFKPTGGKVKEISFKSKPNVWAYFSVKSGGGIHEFADSQFGHVFAYGTTRSAAITTMALALKEVQIRGEIHSNVDYTVDLLNASDFRENKIHTGWLDTRIAMRVQAERPPWYISVVGGALYKTVTANTATVSDYVGYLTKGQIPPKHISLVYTTVALNIDGKKYTIDTVRSGHGSYRLRMNGSTVDANVQILCDGGLLMQLDGNSHVIYAEEEASGTRLLIDGKTCMLQNDHDPSKLLAETPCKLLRFLVADGAHVDADVPYAEVEVMKMCMPLLSPASGVIHVVMSEGQAMQAGDLIARLDLDDPSAVKRAEPFEDTFPQMGLPIAASGQVHKLCAASLNACRMILAGYEHDIDKVVPELVYCLDTPELPFLQWEELMSVLATRLPRNLKSELEGKYEEYKVKFDSGIINDFPANMLRVIIEENLACGSEKEKATNERLVEPLMSLLKSYEGGRESHAHFVVKSLFEEYLYVEELFSDGIQSDVIERLRLQHSKDLQKVVDIVLSHQSVRNKTKLILKLMESLVYPNPAAYRDQLIRFSSLNHKAYYKLALKASELLEQTKLSELRARIARSLSELEMFTEESKGLSMHKREIAIKESMEDLVTAPLPVEDALISLFDCSDTTVQQRVIETYIARLYQPHLVKDSIKMKWIESGVIALWEFPEGHFDARNGGAVLGDKRWGAMVIVKSLESLSMAIRFALKETSHYTSSEGNMMHIALLGADNKMHIIQESGDDADRIAKLPLILKDNVTDLHASGVKTISFIVQRDEARMTMRRTFLWSDEKLSYEEEPILRHVEPPLSALLELDKLKVKGYNEMKYTPSRDRQWHIYTLRNTENPKMLHRVFFRTLVRQPSVSNKFSSGQIGDMEVGSAEEPLSFTSTSILRSLMTAIEELELHAIRTGHSHMYLHVLKEQKLLDLVPVSGNTVLDVGQDEATAYSLLKEMAMKIHELVGARMHHLSVCQWEVKLKLDCDGPASGTWRIVTTNVTSHTCTVDIYREMEDKESRKLVYHPATPAAGPLHGVALNNPYQPLSVIDLKRCSARNNRTTYCYDFPLAFETAVRKSWSSSTSGASKGVENAQCYVKATELVQMDRLAGLNDIGMVAWTLKMSTPEFLSGREIIVVANDITFRAGSFGPREDAFFEAVTNLACEKKLPLIYLAANSGARIGIADEVKSCFRVGWSDDGSPERGFQYIYLSEEDYARIGTSVIAHKMQLDSGEIRWVIDSVVGKEDGLGVENIHGSAAIASAYSRAYKETFTLTFVTGRTVGIGAYLARLGIRCIQRLDQPIILTGYSALNKLLGREVYSSHMQLGGPKIMATNGVVHLTVSDDLEGVSNILRWLSYVPAYIGGPLPVTTPLDPPDRPVAYIPENSCDPRAAIRGVDDSQGKWLGGMFDKDSFVETFEGWAKTVVTGRAKLGGIPVGVIAVETQTMMQTIPADPGQLDSREQSVPRAGQVWFPDSATKTAQALLDFNREGLPLFILANWRGFSGGQRDLFEGILQAGSTIVENLRTYNQPAFVYIPMAAELRGGAWVVVDSKINPDRIECYAERTAKGNVLEPQGLIEIKFRSEELQDCMSRLDPTLIDLKAKLEVANKNGSADTKSLQENIEARTKQLMPLYTQIAIRFAELHDTSLRMAAKGVIKKVVDWEESRSFFYKRLRRRISEDVLAKEIRAVAGEQFSHQPAIELIKKWYSASHAAEWDDDDAFVAWMDNPENYKDYIQYLKAQRVSQSLSSLSDSSSDLQALPQGLSMLLDKMDPSRRAQLVEEIRKVLG

SEQ ID NO: 7 - DNA, 6993 bp, Triticum aestivum
  source 1..6993: mol_type = genomic DNA
gaacactgcatctgcgctgtttgtccaaagggaggacgatgggatccacacatttgcccattgtcggccttaatgcctcgacaacaccatcgctatccactattcgcccggtaaattcagccggtgctgcattccaaccatctgccccttctagaacctccaagaagaaaagtcgtcgtgttcagtcattaagggatggaggcgatggaggcgtgtcagaccctaaccagtctattcgccaaggtcttgccggcatcattgacctcccaaaggagggcacatcagctccggaagtggatatttcacatgggtccgaagaacccaggggctcctaccaaatgaatgggatactgaatgaagcacataatgggaggcatgcttcgctgtctaaggttgtcgaattttgtatggcattgggcggcaaaacaccaattcacagtgtattagttgcgaacaatggaatggcagcagctaagttcatgcggagtgtccgaacatgggctaatgaaacatttgggtcagagaaggcaattcagttgatagctatggctactccagaagacatgaggataaatgcagagcacattagaattgctgatcaatttgttgaagtacccggtggaacaaacaataacaactatgcaaatgtccaactcatagtggagatagcagtgagaaccggtgtttctgctgtttggcctggttggggccatgcatctgagaatcctgaacttccagatgcactaaatgcaaacggaattgtttttcttgggccaccatcatcatcaatgaacgcactaggtgacaaggttggttcagctctcattgctcaagcagcaggggttccgactcttccttggagtggatcacaggtggaaattccattagaagtttgtttggactcgatacccgcggagatgtataggaaagcttgtgttagtactacggaggaagcacttgcgagttgtcagatgattgggtatcccgccatgattaaagcatcatggggtggtggtggtaaagggatccgaaaggttaataatgacgatgatgtcagagcactgtttaagcaagtgcaaggtgaagttcctggctccccaatatttatcatgagacttgcatctcagagtcgacatcttgaagttcagttgctttgtgatcaatatggcaatgtagctgcgcttcacagtcgtgactgcagtgtgcaacggcgacaccaaaagattattgaggaaggaccagttactgttgctcctcgcgagacagtgaaagagctagagcaagcagcaaggaggcttgctaaggctgtgggttatgttggtgctgctactgttgaatatctctacagcatggagactggtgaatactattttctggaacttaatccacggttgcaggttgagcatccagtcaccgagtggatagctgaagtaaacttgcctgcagctcaagttgcagttggaatgggtatacccctttggcaggttccagagatcagacgtttctatggaatggacaatggaggaggctatgacatttggaggaaaacagcagctcttgctactccatttaacttcgatgaagtggattctcaatggccaaagggtcattgtgtagcagttaggataaccagtgaggatccagatgacggattcaagcctaccggtggaaaagtaaaggagatcagttttaaaagcaagccaaatgtttgggcctatttctctgttaagtccggtggaggcattcatgaatttgctgattctcagtttggacatgtttttgcatatggagtgtctagagcagcagcaataaccaacatgtctcttgcgctaaaagagattcaaattcgtggagaaattcattcaaatgttgattacacagttgatctcttgaatgcctcagacttcaaagaaaacaggattcatactggctggctggataacagaatagcaatgcgagtccaagctgagagacctccgtggtatatttcagtggttggaggagctctatataaaacaataacgagcaacacagacactgtttctgaatatgttagctatctcgtcaagggtcagattccaccgaagcatatatcccttgtccattcaactgtttctttgaatatagaggaaagcaaatatacaattgaaactataaggagcggacagggtagctacagattgcgaatgaatggatcagttattgaagcaaatgtccaaacattatgtgatggtggacttttaatgcagttggatggaaacagccatgtaatttatgctgaagaagaggccggtggtacacggcttctaattgatggaaagacatgcttgttacagaatgatcacgatccttcaaggttattagctgagacaccctgcaaacttcttcgtttcttggttgccgatggtgctcatgttgaagctgatgtaccatatgcggaagttgaggttatgaagatgtgcatgcccctcttgtcacctgctgctggtgtcattaatgttttgttgtctgagggccagcctatgcaggctggtgatcttatagcaagacttgatcttgatgacccttctgctgtgaagagagctgagccatttaacggatctttcccagaaatgagccttcctattgctgcttctggccaagttcacaaaagatgtgccacaagcttgaatgctgctcggatggtccttgcaggatatgatcacccgatcaacaaagttgtacaagatctggtatcctgtctagatgctcctgagcttcctttcctacaatgggaagagcttatgtctgttttagcaactagacttccaaggcttcttaagagcgagttggagggtaaatacagtgaatataagttaaatgttggccatgggaagagcaaggatttcccttccaagatgctaagagagataatcgaggaaaatcttgcacatggttctgagaaggaaattgctacaaatgagaggcttgttgagcctcttatgagcctactgaagtcatatgagggtggcagagaaagccatgcacactttattgtgaagtcccttttcgaggactatctctcggttgaggaactattcagtgatggcattcagtctgatgtgattgaacgcctgcgccaacaacatagtaaagatctccagaaggttgtagacattgtgttgtctcaccagggtgtgagaaacaaaactaagctgatactaacactcatggagaaactggtctatccaaaccctgctgtctacaaggatcagttgactcgcttttcctccctcaatcacaaaagatattataagttggcccttaaagctagcgagcttcttgaacaaaccaagcttagtgagctccgcacaagcattgcaaggagcctttcagaacttgagatgtttactgaagaaaggacggccattagtgagatcatgggagatttagtgactgccccactgccagttgaagatgcactggtttctttgtttgattgtagtgatcaaactcttcagcagagggtgatcgagacgtacatatctcgattataccagcctcatcttgtcaaggatagtatccagctgaaatatcaggaatctggtgttattgctttatgggaattcgctgaagcgcattcagagaagagattgggtgctatggttattgtgaagtcgttagaatctgtatcagcagcaattggagctgcactaaagggtacatcacgctatgcaagctctgagggtaacataatgcatattgctttattgggtgctgataatcaaatgcatggaactgaagacagtggtgataacgatcaagctcaagtcaggatagacaaactttctgcgacactggaacaaaatactgtcacagctgatctccgtgctgctggtgtgaaggttattagttgcattgttcaaagggatggagcactcatgcctatgcgccataccttcctcttgtcggatgaaaagctttgttatgaggaagagccggttctccggcatgtggagcctcctctttctgctcttcttgagttgggtaagttgaaagtgaaaggatacaatgaggtgaagtatacaccgtcacgtgatcgtcagtggaacatatacacacttagaaatacagagaaccccaaaatgttgcacagggtgtttttccgaactcttgtcaggcaacccggtgcttccaacaaattcacatcaggcaacatcagtgatgttgaagtgggaggagctgaggaatctctttcatttacatcgagcagcatattaagatcgctgatgactgctatagaagagttggagcttcacgcgattaggacaggtcactctcatatgtttttgtgcatattgaaagagcaaaagcttcttgatcttgttcccgtttcagggaacaaagttgtggatattggccaagatgaagctactgcatgcttgcttctgaaagaaatggctctacagatacatgaacttgtgggtgcaaggatgcatcatctttctgtatgccaatgggaggtgaaacttaagttggacagcgatgggcctgccagtggtacctggagagttgtaacaaccaatgttactagtcacacctgcactgtggatatctaccgtgaggtcgaagatacagaatcacagaaactagtgtaccactctgctccatcgtcatctggtcctttgcatggcgttgcactgaatactccatatcagcctttgagtgttattgatctgaaacgttgctccgctagaaataacagaactacatactgctatgattttccgttggcatttgaaactgcagtgcagaagtcatggtctaacatttctagtgacactaaccgatgttatgttaaagcgacggagctggtgtttgctcacaagaacgggtcatggggcactcctgtaattcctatggagcgtcctgctgggctcaatgacattggtatggtagcttggatcttggacatgtccactcctgaatatcccaatggcaggcagattgttgtcatcgcaaatgatattacttttagagctggatcgtttggtccaagggaagatgcattttttgaaactgttaccaacctagcttgtgagaggaagcttcctctcatctacttggcagcaaactctggtgctcggatcggcatagcagatgaagtaaaatcttgcttccgtgttggatggtctgatgatggcagccctgaacgtgggtttcaatatatttatctgactgaagaagaccatgctcgtattagcgcttctgttatagcgcacaagatgcagcttgataatggtgaaattaggtgggttattgattctgttgtagggaaggaggatgggctaggtgtggagaacatacatggaagtgctgctattgccagtgcctattctagggcctatgaggagacatttacgcttacatttgtgactggaaggactgttggaataggagcatatcttgctcgacttggcatacggtgcatacagcgtactgaccagcccattatcctaactgggttctctgccttgaacaagcttcttggccgggaagtttacagctcccacatgcagttgggtggccccaaaattatggcgacaaacggtgttgtccatctgacagtttcagatgaccttgaaggtgtatctaatatattgaggtggctcagctatgttcctgccaacattggtggacctcttcctattacaaaatctttggacccacctgacagacccgttgcttacatccctgagaatacatgcgatcctcgtgctgccatcagtggcattgatgatagccaagggaaatggttggggggcatgttcgacaaagacagttttgtggagacatttgaaggatgggcgaagtcagttgttactggcagagcgaaactcggagggattccggtgggtgttatagctgtggagacacagactatgatgcagctcatccctgctgatccaggccagcttgattcccatgagcgatctgttcctcgtgctgggcaagtctggtttccagattcagctactaagacagcgcaggcaatgctggacttcaaccgtgaaggattacctctgttcatccttgctaactggagaggcttctctggtggacaaagagatctttttgaaggaatccttcaggctgggtcaacaattgttgagaaccttaggacatacaatcagcctgcctttgtatatatccccaaggctgcagagctacgtggaggggcttgggtcgtgattgatagcaagataaatccagatcgcattgagttctatgctgagaggactgcaaagggcaatgttctcgaacctcaagggttgatcgagatcaagttcaggtcagaggaactccaagagtgcatgggtaggcttgatccagaattgataaatctgaaggcaaagctccagggagtaaagcatgaaaatggaagtctacctgagtcagaatcccttcagaagagcatagaagcccggaagaaacagttgttgcctttgtatactcaaattgcggtacggttcgctgaattgcatgacacttcccttagaatggctgctaagggtgtgattaagaaggttgtagactgggaagattctaggtcgttcttctacaagagattacggaggaggatatccgaggatgttcttgcgaaggaaattagaggtgtaagtggcaagcagttttctcaccaatcggcaatcgagctgatccagaaatggtacttggcctctaagggagctgaaacaggaagcactgaatgggatgatgacgatgcttttgttgcctggagggaaaaccctgaaaactaccaggagtatatcaaagaactcagggctcaaagggtatctcagttgctctcagatgttgcagactccagtccagatctagaagccttgccacagggtctttctatgctattagagaagatggatccctcaaggagagcacagtttgttgaggaagtcaagaaagtccttaaatgatcagatgataccgtcgacg

SEQ ID NO: 8 - protein, 2311 aa, Triticum aestivum
MGSTHLPIVGLNASTTPSLSTIRPVNSAGAAFQPSAPSRTSKKKSRRVQSLRDGGDGGVSDPNQSIRQGLAGIIDLPKEGTSAPEVDISHGSEEPRGSYQMNGILNEAHNGRHASLSKVVEFCMALGGKTPIHSVLVANNGMAAAKFMRSVRTWANETFGSEKAIQLIAMATPEDMRINAEHIRIADQFVEVPGGTNNNNYANVQLIVEIAVRTGVSAVWPGWGHASENPELPDALNANGIVFLGPPSSSMNALGDKVGSALIAQAAGVPTLPWSGSQVEIPLEVCLDSIPAEMYRKACVSTTEEALASCQMIGYPAMIKASWGGGGKGIRKVNNDDDVRALFKQVQGEVPGSPIFIMRLASQSRHLEVQLLCDQYGNVAALHSRDCSVQRRHQKIIEEGPVTVAPRETVKELEQAARRLAKAVGYVGAATVEYLYSMETGEYYFLELNPRLQVEHPVTEWIAEVNLPAAQVAVGMGIPLWQVPEIRRFYGMDNGGGYDIWRKTAALATPFNFDEVDSQWPKGHCVAVRITSEDPDDGFKPTGGKVKEISFKSKPNVWAYFSVKSGGGIHEFADSQFGHVFAYGVSRAAAITNMSLALKEIQIRGEIHSNVDYTVDLLNASDFKENRIHTGWLDNRIAMRVQAERPPWYISVVGGALYKTITSNTDTVSEYVSYLVKGQIPPKHISLVHSTVSLNIEESKYTIETIRSGQGSYRLRMNGSVIEANVQTLCDGGLLMQLDGNSHVIYAEEEAGGTRLLIDGKTCLLQNDHDPSRLLAETPCKLLRFLVADGAHVEADVPYAEVEVMKMCMPLLSPAAGVINVLLSEGQPMQAGDLIARLDLDDPSAVKRAEPFNGSFPEMSLPIAASGQVHKRCATSLNAARMVLAGYDHPINKVVQDLVSCLDAPELPFLQWEELMSVLATRLPRLLKSELEGKYSEYKLNVGHGKSKDFPSKMLREIIEENLAHGSEKEIATNERLVEPLMSLLKSYEGGRESHAHFIVKSLFEDYLSVEELFSDGIQSDVIERLRQQHSKDLQKVVDIVLSHQGVRNKTKLILTLMEKLVYPNPAVYKDQLTRFSSLNHKRYYKLALKASELLEQTKLSELRTSIARSLSELEMFTEERTAISEIMGDLVTAPLPVEDALVSLFDCSDQTLQQRVIETYISRLYQPHLVKDSIQLKYQESGVIALWEFAEAHSEKRLGAMVIVKSLESVSAAIGAALKGTSRYASSEGNIMHIALLGADNQMHGTEDSGDNDQAQVRIDKLSATLEQNTVTADLRAAGVKVISCIVQRDGALMPMRHTFLLSDEKLCYEEEPVLRHVEPPLSALLELGKLKVKGYNEVKYTPSRDRQWNIYTLRNTENPKMLHRVFFRTLVRQPGASNKFTSGNISDVEVGGAEESLSFTSSSILRSLMTAIEELELHAIRTGHSHMFLCILKEQKLLDLVPVSGNKVVDIGQDEATACLLLKEMALQIHELVGARMHHLSVCQWEVKLKLDSDGPASGTWRVVTTNVTSHTCTVDIYREVEDTESQKLVYHSAPSSSGPLHGVALNTPYQPLSVIDLKRCSARNNRTTYCYDFPLAFETAVQKSWSNISSDTNRCYVKATELVFAHKNGSWGTPVIPMERPAGLNDIGMVAWILDMSTPEYPNGRQIVVIANDITFRAGSFGPREDAFFETVTNLACERKLPLIYLAANSGARIGIADEVKSCFRVGWSDDGSPERGFQYIYLTEEDHARISASVIAHKMQLDNGEIRWVIDSVVGKEDGLGVENIHGSAAIASAYSRAYEETFTLTFVTGRTVGIGAYLARLGIRCIQRTDQPIILTGFSALNKLLGREVYSSHMQLGGPKIMATNGVVHLTVSDDLEGVSNILRWLSYVPANIGGPLPITKSLDPPDRPVAYIPENTCDPRAAISGIDDSQGKWLGGMFDKDSFVETFEGWAKSVVTGRAKLGGIPVGVIAVETQTMMQLIPADPGQLDSHERSVPRAGQVWFPDSATKTAQAMLDFNREGLPLFILANWRGFSGGQRDLFEGILQAGSTIVENLRTYNQPAFVYIPKAAELRGGAWVVIDSKINPDRIEFYAERTAKGNVLEPQGLIEIKFRSEELQECMGRLDPELINLKAKLQGVKHENGSLPESESLQKSIEARKKQLLPLYTQIAVRFAELHDTSLRMAAKGVIKKVVDWEDSRSFFYKRLRRRISEDVLAKEIRGVSGKQFSHQSAIELIQKWYLASKGAETGSTEWDDDDAFVAWRENPENYQEYIKELRAQRVSQLLSDVADSSPDLEALPQGLSMLLEKMDPSRRAQFVEEVKKVLK

SEQ ID NO: 9 - DNA, 7324 bp, Zea mays
  source 1..7324: mol_type = genomic DNA
aacgacaatgtcacagcttggattagccgcagctgcctcaaaggccttgccactactccctaatcgccagagaagttcagctgggactacattctcatcatcttcattatcgaggcccttaaacagaaggaaaagccgtactcgttcactccgtgatggcggagatggggtatcagatgccaaaaagcacagccagtctgttcgtcaaggtcttgctggcattatcgacctcccaagtgaggcaccttccgaagtggatatttcacatggatctgaggatcctagggggccaacagattcttatcaaatgaatgggattatcaatgaaacacataatggaagacatgcctcagtgtccaaggttgttgaattttgtgcggcactaggtggcaaaacaccaattcacagtatattagtggccaacaatggaatggcagcagcaaaatttatgaggagtgtccggacatgggctaatgatacttttggatctgagaaggcaattcaactcatagctatggcaactccggaagacatgaggataaatgcagaacacattagaattgctgaccaattcgtagaggtgcctggtggaacaaacaataataactacgccaatgttcaactcatagtggagatggcacaaaaactaggtgtttctgctgtttggcctggttggggtcatgcttctgagaatcctgaactgccagatgcattgaccgcaaaagggatcgtttttcttggcccacctgcatcatcaatgaatgctttgggagataaggtcggctcagctctcattgctcaagcagccggggtcccaactcttgcttggagtggatcacatgttgaagttccattagagtgctgcttagacgcgatacctgaggagatgtatagaaaagcttgcgttactaccacagaggaagcagttgcaagttgtcaagtggttggttatcctgccatgattaaggcatcctggggaggtggtggtaaaggaataagaaaggttcataatgatgatgaggttagagcgctgtttaagcaagtacaaggtgaagtccctggctccccaatatttgtcatgaggcttgcatcccagagtcggcatcttgaagttcagttgctttgtgatcaatatggtaatgtagcagcacttcacagtcgtgattgcagtgtgcaacggcgacaccagaagattattgaagaaggtccagttactgttgctcctcgtgagacagttaaagcacttgagcaggcagcaaggaggcttgctaaggctgtgggttatgttggtgctgctactgttgagtatctttacagcatggaaactggagactactattttctggaacttaatccccgactacaggttgagcatccagtcaccgagtggatagctgaagtaaatctgcctgcagctcaagttgctgttggaatgggcatacctctttggcagattccagaaatcagacgtttctatggaatggactatggaggagggtatgacatttggaggaaaacagcagctcttgctacaccatttaattttgatgaagtagattctcaatggccaaagggccattgtgtagcagttagaattactagtgaggacccagatgatggtttcaaacctactggtgggaaagtgaaggagataagttttaaaagcaagcctaatgtttgggcctacttctcagtaaagtctggtggaggcattcatgaatttgctgattctcagttcggacatgtttttgcatatgggctctctagatcagcagcaataacaaacatgactcttgcattaaaagagattcaaattcgtggagaaattcattcaaatgttgattacacagttgacctcttaaatgcttcagactttagagaaaacaagattcatactggttggctcgacaccagaatagctatgcgtgttcaagctgagaggcccccatggtatatttcagtggttgggggtgctttatataaaacagtaaccaccaatgcagccactgtttctgaatatgttagttatctcaccaagggccagattccaccaaagcatatatcccttgtcaattctacagttaatttgaatatagaagggagcaaatacacaattgaaactgtaaggactggacatggtagctacaggttgagaatgaatgattcaacagttgaagcgaatgtacaatctttatgtgatggtggcctcttaatgcagttggatggaaacagccatgtaatttatgcagaagaagaagctggtggtacacggcttcagattgatggaaagacatgtttattgcagaatgaccatgatccatcaaagttattagctgagacaccctgcaaacttcttcgtttcttggttgctgatggtgctcatgttgatgcggatgtaccatacgcggaagttgaggttatgaagatgtgcatgcctctcttgtcgcctgcttctggtgtcattcattgtatgatgtctgagggccaggcattgcaggctggtgatcttatagcaaggttggatcttgatgacccttctgctgtgaaaagagctgagccatttgatggaatatttccacaaatggagctccctgttgctgtctctagtcaagtacacaaaagatatgctgcaagtttgaatgctgctcgaatggtccttgcaggatatgagcacaatattaatgaagtcgttcaagatttggtatgctgcctggacaaccctgagcttcctttcctacagtgggatgaacttatgtctgttctagcaacgaggcttccaagaaatctcaagagtgagttagaggataaatacaaggaatacaagttgaatttttaccatggaaaaaacgaggactttccatccaagttgctaagagacatcattgaggaaaatctttcttatggttcagagaaggaaaaggctacaaatgagaggcttgttgagcctcttatgaacctactgaagtcatatgagggtgggagagagagccatgcacattttgttgtcaagtctcttttcgaggagtatcttacagtggaagaactttttagtgatggcattcagtctgacgtgattgaaacattgcggcatcagcacagtaaagacctgcagaaggttgtagacattgtgttgtctcaccagggtgtgaggaacaaagctaagcttgtaacggcacttatggaaaagctggtttatccaaatcctggtggttacagggatctgttagttcgcttttcttccctcaatcataaaagatattataagttggcccttaaagcaagtgaacttcttgaacaaaccaaactaagtgaactccgtgcaagcgttgcaagaagcctttcggatctggggatgcataagggagaaatgagtattaaggataacatggaagatttagtctctgccccattacctgttgaagatgctctgatttctttgtttgattacagtgatcgaactgttcagcagaaagtgattgagacatacatatcacgattgtaccagcctcatcttgtaaaggatagcatccaaatgaaattcaaggaatctggtgctattactttttgggaattttatgaagggcatgttgatactagaaatggacatggggctattattggtgggaagcgatggggtgccatggtcgttctcaaatcacttgaatctgcgtcaacagccattgtggctgcattaaaggattcggcacagttcaacagctctgagggcaacatgatgcacattgcattattgagtgctgaaaatgaaagtaatataagtggaataagtgatgatcaagctcaacataagatggaaaagcttagcaagatactgaaggatactagcgttgcaagtgatctccaagctgctggtttgaaggttataagttgcattgttcaaagagatgaagctcgcatgccaatgcgccacacattcctctggttggatgacaagagttgttatgaagaagagcagattctccggcatgtggagcctcccctctctacacttcttgaattggataagttgaaggtgaaaggatacaatgaaatgaagtatactccttcgcgtgaccgccaatggcatatctacacactaagaaatactgaaaaccccaaaatgttgcatagggtgtttttccgaactattgtcaggcaacccaatgcaggcaacaagtttacatcggctcagatcagcgacgctgaagtaggatgtcccgaagaatctctttcatttacatcaaatagcatcttaagatcattgatgactgctattgaagaattagagcttcatgcaattaggacaggtcattctcacatgtatttgtgcatactgaaagagcaaaagcttcttgacctcattccattttcagggagtacaattgttgatgttggccaagatgaagctaccgcttgttcacttttaaaatcaatggctttgaagatacatgagcttgttggtgcaaggatgcatcatctgtctgtatgccagtgggaggtgaaactcaagttggactgtgatggccctgcaagtggtacctggagagttgtaactacaaatgttactggtcacacctgcaccattgatatataccgagaagtggaggaaatagaatcgcagaagttagtgtaccattcagccacttcgtcagctggaccattgcatggtgttgcactgaataatccatatcaacctttgagtgtgattgatctaaagcgctgctctgctaggaacaacagaacaacatattgctatgattttccgctggcctttgaaactgcactgcagaagtcatggcagaccaatggctctactgtttctgaaggcaatgaaaatagtaaatcctacgtgaaggcaactgagctagtgtttgctgaaaaacatgggtcctggggcactcctataattccgatggaacgccctgctgggctcaacgacattggtatggtcgcttggatcatggagatgtcaacacctgaatttcccaatggcaggcagattattgttgtagcaaatgatatcactttcagagctggatcatttggcccaagggaagatgcattttttgaaactgtcactaacctggcttgcgaaaggaaacttcctcttatatacttggcagcaaactctggtgctaggattggcatagctgatgaagtaaaatcttgcttccgtgttggatggtctgacgaaggcagtcctgaacgagggtttcagtacatctatctgactgaagaagactatgctcgcattagctcttctgttatagcacataagctggagctagatagtggtgaaattaggtggattattgactctgttgtgggcaaggaggatgggcttggtgtcgagaacatacatggaagtgctgctattgccagtgcttattctagggcatatgaggagacatttacacttacatttgtgactgggcggactgtaggaataggagcttatcttgctcgacttggtatacggtgcatacagcgtcttgaccagcctattattttaacagggttttctgccctgaacaagctccttgggcgggaagtgtacagctcccacatgcagcttggtggtcctaagatcatggcgactaatggtgttgtccacctcactgttccagatgaccttgaaggtgtttccaatatattgaggtggctcagctatgttcctgcaaacattggtggacctcttcctattaccaaacctctggaccctccagacagacctgttgcttacatccctgagaacacatgcgatccacgtgcagctatctgtggtgtagatgacagccaagggaaatggttgggtggtatgtttgacaaagacagctttgtggagacatttgaaggatgggcaaaaacagtggttactggcagagcaaagcttggaggaattcctgtgggcgtcatagctgtggagacacagaccatgatgcagatcatccctgctgatccaggtcagcttgattcccatgagcgatctgtccctcgtgctggacaagtgtggttcccagattctgcaaccaagaccgctcaggcattattagacttcaaccgtgaaggattgcctctgttcatcctggctaattggagaggcttctctggtggacaaagagatctctttgaaggaattcttcaggctgggtcaacaattgtcgagaaccttaggacatataatcagcctgcttttgtgtacattcctatggctggagagcttcgtggaggagcttgggttgtggtcgatagcaaaataaatccagaccgcattgagtgttatgctgaaaggactgccaaaggtaatgttctcgaacctcaagggttaattgaaatcaagttcaggtcagaggaactccaagactgtatgggtaggcttgacccagagttgataaatctgaaagcaaaactccaagatgtaaatcatggaaatggaagtctaccagacatagaagggattcggaagagtatagaagcacgtacgaaacagttgctgcctttatatacccagattgcaatacggtttgctgaattgcatgatacttccctaagaatggcagctaaaggtgtgattaagaaagttgtagactgggaagaatcacgctcgttcttctataaaaggctacggaggaggatcgcagaagatgttcttgcaaaagaaataaggcagatagtcggtgataaatttacgcaccaattagcaatggagctcatcaaggaatggtaccttgcttctcaggccacaacaggaagcactggatgggatgacgatgatgcttttgttgcctggaaggacagtcctgaaaactacaaggggcatatccaaaagcttagggctcaaaaagtgtctcattcgctctctgatcttgctgactccagttcagatctgcaagcattctcgcagggtctttctacgctattagataagatggatccctctcagagagcgaagtttgttcaggaagtcaagaaggtccttgattgatgataccaacacatccaacacaatgtgtgcatgtcacatctttttgttctagtacatacatagaaggatattgcttggtcttgattgatcatgtctgatttaagtcgactattatttcttggatttttcttttggacctggtgctatggttgatggatgtatattggatatgtgcgttctgccaggtgtaagcacaaaggtttagacagaccgagagcaagagcgagtgaacctgttctggttttgcagtggttcagtaaggcagaaagttgttaaaccgtagttctgagatgtattaccagtggcgccatgctgtacttttagggtgtataatgcggatac

SEQ ID NO: 10 - protein, 2324 aa, Zea mays
MSQLGLAAAASKALPLLPNRQRSSAGTTFSSSSLSRPLNRRKSRTRSLRDGGDGVSDAKKHSQSVRQGLAGIIDLPSEAPSEVDISHGSEDPRGPTDSYQMNGIINETHNGRHASVSKVVEFCAALGGKTPIHSILVANNGMAAAKFMRSVRTWANDTFGSEKAIQLIAMATPEDMRINAEHIRIADQFVEVPGGTNNNNYANVQLIVEMAQKLGVSAVWPGWGHASENPELPDALTAKGIVFLGPPASSMNALGDKVGSALIAQAAGVPTLAWSGSHVEVPLECCLDAIPEEMYRKACVTTTEEAVASCQVVGYPAMIKASWGGGGKGIRKVHNDDEVRALFKQVQGEVPGSPIFVMRLASQSRHLEVQLLCDQYGNVAALHSRDCSVQRRHQKIIEEGPVTVAPRETVKALEQAARRLAKAVGYVGAATVEYLYSMETGDYYFLELNPRLQVEHPVTEWIAEVNLPAAQVAVGMGIPLWQIPEIRRFYGMDYGGGYDIWRKTAALATPFNFDEVDSQWPKGHCVAVRITSEDPDDGFKPTGGKVKEISFKSKPNVWAYFSVKSGGGIHEFADSQFGHVFAYGLSRSAAITNMTLALKEIQIRGEIHSNVDYTVDLLNASDFRENKIHTGWLDTRIAMRVQAERPPWYISVVGGALYKTVTTNAATVSEYVSYLTKGQIPPKHISLVNSTVNLNIEGSKYTIETVRTGHGSYRLRMNDSTVEANVQSLCDGGLLMQLDGNSHVIYAEEEAGGTRLQIDGKTCLLQNDHDPSKLLAETPCKLLRFLVADGAHVDADVPYAEVEVMKMCMPLLSPASGVIHCMMSEGQALQAGDLIARLDLDDPSAVKRAEPFDGIFPQMELPVAVSSQVHKRYAASLNAARMVLAGYEHNINEVVQDLVCCLDNPELPFLQWDELMSVLATRLPRNLKSELEDKYKEYKLNFYHGKNEDFPSKLLRDIIEENLSYGSEKEKATNERLVEPLMNLLKSYEGGRESHAHFVVKSLFEEYLTVEELFSDGIQSDVIETLRHQHSKDLQKVVDIVLSHQGVRNKAKLVTALMEKLVYPNPGGYRDLLVRFSSLNHKRYYKLALKASELLEQTKLSELRASVARSLSDLGMHKGEMSIKDNMEDLVSAPLPVEDALISLFDYSDRTVQQKVIETYISRLYQPHLVKDSIQMKFKESGAITFWEFYEGHVDTRNGHGAIIGGKRWGAMVVLKSLESASTAIVAALKDSAQFNSSEGNMMHIALLSAENESNISGISDDQAQHKMEKLSKILKDTSVASDLQAAGLKVISCIVQRDEARMPMRHTFLWLDDKSCYEEEQILRHVEPPLSTLLELDKLKVKGYNEMKYTPSRDRQWHIYTLRNTENPKMLHRVFFRTIVRQPNAGNKFTSAQISDAEVGCPEESLSFTSNSILRSLMTAIEELELHAIRTGHSHMYLCILKEQKLLDLIPFSGSTIVDVGQDEATACSLLKSMALKIHELVGARMHHLSVCQWEVKLKLDCDGPASGTWRVVTTNVTGHTCTIDIYREVEEIESQKLVYHSATSSAGPLHGVALNNPYQPLSVIDLKRCSARNNRTTYCYDFPLAFETALQKSWQTNGSTVSEGNENSKSYVKATELVFAEKHGSWGTPIIPMERPAGLNDIGMVAWIMEMSTPEFPNGRQIIVVANDITFRAGSFGPREDAFFETVTNLACERKLPLIYLAANSGARIGIADEVKSCFRVGWSDEGSPERGFQYIYLTEEDYARISSSVIAHKLELDSGEIRWIIDSVVGKEDGLGVENIHGSAAIASAYSRAYEETFTLTFVTGRTVGIGAYLARLGIRCIQRLDQPIILTGFSALNKLLGREVYSSHMQLGGPKIMATNGVVHLTVPDDLEGVSNILRWLSYVPANIGGPLPITKPLDPPDRPVAYIPENTCDPRAAICGVDDSQGKWLGGMFDKDSFVETFEGWAKTVVTGRAKLGGIPVGVIAVETQTMMQIIPADPGQLDSHERSVPRAGQVWFPDSATKTAQALLDFNREGLPLFILANWRGFSGGQRDLFEGILQAGSTIVENLRTYNQPAFVYIPMAGELRGGAWVVVDSKINPDRIECYAERTAKGNVLEPQGLIEIKFRSEELQDCMGRLDPELINLKAKLQDVNHGNGSLPDIEGIRKSIEARTKQLLPLYTQIAIRFAELHDTSLRMAAKGVIKKVVDWEESRSFFYKRLRRRIAEDVLAKEIRQIVGDKFTHQLAMELIKEWYLASQATTGSTGWDDDDAFVAWKDSPENYKGHIQKLRAQKVSHSLSDLADSSSDLQAFSQGLSTLLDKMDPSQRAKFVQEVKKVLD

SEQ ID NO: 11 - DNA, 7327 bp, Zea mays
  source 1..7327: mol_type = genomic DNA
aacgacaatgtcacagcttggattagccgcagctgcctcaaaggccttgccactactccctaatcgccagagaagttcagctgggactacattctcatcatcttcattatcgaggcccttaaacagaaggaaaagccgtactcgttcactccgtgatggcggagatggggtatcagatgccaaaaagcacagccagtctgttcgtcaaggtcttgctggcattatcgacctcccaagtgaggcaccttccgaagtggatatttcacatggatctgaggatcctagggggccaacagattcttatcaaatgaatgggattatcaatgaaacacataatggaagacatgcctcagtgtccaaggttgttgaattttgtgcggcactaggtggcaaaacaccaattcacagtatattagtggccaacaatggaatggcagcagcaaaatttatgaggagtgtccggacatgggctaatgatacttttggatctgagaaggcaattcaactcatagctatggcaactccggaagacatgaggataaatgcagaacacattagaattgctgaccaattcgtagaggtgcctggtggaacaaacaataataactacgccaatgttcaactcatagtggagatggcacaaaaactaggtgtttctgctgtttggcctggttggggtcatgcttctgagaatcctgaactgccagatgcattgaccgcaaaagggatcgtttttcttggcccacctgcatcatcaatgaatgctttgggagataaggtcggctcagctctcattgctcaagcagccggggtcccaactcttgctcggagtggatcacatgttgaagttccattagagtgctgcttagacgcgatacctgaggagatgtatagaaaagcttgcgttactaccacagaggaagcagttgcaagttgtcaagtggttggttatcctgccatgattaaggcatcctggggaggtggtggtaaaggaataagaaaggttcataatgatgatgaggttagagcgctgtttaagcaagtacaaggtgaagtccctggctccccaatatttgtcatgaggcttgcatcccagagtcggcatcttgaagttcagttgctttgtgatcaatatggtaatgtagcagcacttcacagtcgtgattgcagtgtgcaacggcgacaccagaagattattgaagaaggtccagttactgttgctcctcgtgagacagttaaagcacttgagcaggcagcaaggaggcttgctaaggctgtgggttatgttggtgctgctactgttgagtatctttacagcatggaaactggagactactattttctggaacttaatccccgactacaggttgagcatccagtcaccgagtggatagctgaagtaaatctgcctgcagctcaagttgctgttggaatgggcatacctctttggcagattccagaaatcagacgtttctatggaatggactatggaggagggtatgacatttggaggaaaacagcagctcttgctacaccatttaattttgatgaagtagattctcaatggccaaagggccattgtgtagcagttagaattactagtgaggacccagatgatggtttcaaacctactggtgggaaagtgaaggagataagttttaaaagcaagcctaatgtttgggcctacttctcagtaaagtctggtggaggcattcatgaatttgctgattctcagttcggacatgtttttgcatatgggctctctagatcagcagcaataacaaacatgactcttgcattaaaagagattcaaattcgtggagaaattcattcaaatgttgattacacagttgacctcttaaatgcttcagactttagagaaaacaagattcatactggttggctcgacaccagaatagctatgcgtgttcaagctgagaggcccccatggtatatttcagtggttggaggtgctttatataaaacagtaaccaccaatgcagccactgtttctgaatatgttagttatctcaccaagggccagattccaccaaagcatatatcccttgtcaattctacagttaatttgaatatagaagggagcaaatacacaattgaaactgtaaggactggacatggtagctacaggttgagaatgaatgattcaacagttgaagcgaatgtacaatctttatgtgatggtggcctcttaatgcagttggatggaaacagccatgtaatttatgcagaagaagaagctggtggtacacggcttcagattgatggaaagacatgtttattgcagaatgaccatgatccatcaaagttattagctgagacaccctgcaaacttcttcgtttcttggttgctgatggtgctcatgttgatgcggatgtaccatacgcggaagttgaggttatgaagatgtgcatgcctctcttgtcacctgcttctggtgtcattcattgtatgatgtctgagggccaggcattgcaggctggtgatcttatagcaaggttggatcttgatgacccttctgctgtgaaaagagctgagccatttgatggaatatttccacaaatggagctccctgttgctgtctctagtcaagtacacaaaagatatgctgcaagtttgaatgctgctcgaatggtccttgcaggatatgagcacaatattaatgaagtcgttcaagatttggtatgctgcctggacaaccctgagcttcctttcctacagtgggatgaacttatgtctgttctagcaacgaggcttccaagaaatctcaagagtgagttagaggataaatacaaggaatacaagttgaatttttaccatggaaaaaacgaggactttccatccaagttgctaagagacatcattgaggaaaatctttcttatggttcagagaaggaaaaggctacaaatgagaggcttgttgagcctcttatgaacctactgaagtcatatgagggtgggagagagagccatgcacattttgttgtcaagtctcttttcgaggagtatcttacagtggaagaactttttagtgatggcattcagtctgacgtgattgaaacattgcggcatcagcacagtaaagacctgcagaaggttgtagacattgtgttgtctcaccagggtgtgaggaacaaagctaagcttgtaacggcacttatggaaaagctggtttatccaaatcctggtggttacagggatctgttagttcgcttttcttccctcaatcataaaagatattataagttggcccttaaagcaagtgaacttcttgaacaaaccaaactaagtgaactccgtgcaagcgttgcaagaagcctttcggatctggggatgcataagggagaaatgagtattaaggataacatggaagatttagtctctgccccattacctgttgaagatgctctgatttctttgtttgattacagtgatcgaactgttcagcagaaagtgattgagacatacatatcacgattgtaccagcctcatcttgtaaaggatagcatccaaatgaaattcaaggaatctggtgctattactttttgggaattttatgaagggcatgttgatactagaaatggacatggggctattattggtgggaagcgatggggtgccatggtcgttctcaaatcacttgaatctgcgtcaacagccattgtggctgcattaaaggattcggcacagttcaacagctctgagggcaacatgatgcacattgcattattgagtgctgaaaatgaaagtaatataagtggaataagcagtgatgatcaagctcaacataagatggaaaagcttagcaagatactgaaggatactagcgttgcaagtgatctccaagctgctggtttgaaggttataagttgcattgttcaaagagatgaagctcgcatgccaatgcgccacacattcctctggttggatgacaagagttgttatgaagaagagcagattctccggcatgtggagcctcccctctctacacttcttgaattggataagttgaaggtgaaaggatacaatgaaatgaagtatactccttcgcgtgaccgccaatggcatatctacacactaagaaatactgaaaaccccaaaatgttgcatagggtgtttttccgaactattgtcaggcaacccaatgcaggcaacaagtttacatcggctcagatcagcgacgctgaagtaggatgtcccgaagaatctctttcatttacatcaaatagcatcttaagatcattgatgactgctattgaagaattagagcttcatgcaattaggacaggtcattctcacatgtatttgtgcatactgaaagagcaaaagcttcttgacctcattccattttcagggagtacaattgttgatgttggccaagatgaagctaccgcttgttcacttttaaaatcaatggctttgaagatacatgagcttgttggtgcaaggatgcatcatctgtctgtatgccagtgggaggtgaaactcaagttggactgtgatggccctgcaagtggtacctggagagttgtaactacaaatgttactggtcacacctgcaccattgatatataccgagaagtggaggaaatagaatcgcagaagttagtgtaccattcagccacttcgtcagctggaccattgcatggtgttgcactgaataatccatatcaacctttgagtgtgattgatctaaagcgctgctctgctaggaacaacagaacaacatattgctatgattttccgctggcctttgaaactgcactgcagaagtcatggcagtccaatggctctactgtttctgaaggcaatgaaaatagtaaatcctacgtgaaggcaactgagctagtgtttgctgaaaaacatgggtcctggggcactcctataattccgatggaacgccctgctgggctcaacgacattggtatggtcgcttggatcatggagatgtcaacacctgaatttcccaatggcaggcagattattgttgtagcaaatgatatcactttcagagctggatcatttggcccaagggaagatgcattttttgaaactgtcactaacctggcttgcgaaaggaaacttcctcttatatacttggcagcaaactctggtgctaggattggcatagctgatgaagtaaaatcttgcttccgtgttggatggtctgacgaaggcagtcctgaacgagggtttcagtacatctatctgactgaagaagactatgctcgcattagctcttctgttatagcacataagctggagctagatagtggtgaaattaggtggattattgactctgttgtgggcaaggaggatgggcttggtgtcgagaacatacatggaagtgctgctattgccagtgcttattctagggcatatgaggagacatttacacttacatttgtgactgggcggactgtaggaataggagcttatcttgctcgacttggtatacggtgcatacagcgtcttgaccagcctattattttaacagggttttctgccctgaacaagctccttgggcgggaagtgtacagctcccacatgcagcttggtggtcctaagatcatggcgactaatggtgttgtccacctcactgttccagatgaccttgaaggtgtttccaatatattgaggtggctcagctatgttcctgcaaacattggtggacctcttcctattaccaaacctctggaccctccagacagacctgttgcttacatccctgagaacacatgcgatccacgtgcagctatctgtggtgtagatgacagccaagggaaatggttgggtggtatgtttgacaaagacagctttgtggagacatttgaaggatgggcaaaaacagtggttactggcagagcaaagcttggaggaattcctgtgggcgtcatagctgtggagacacagaccatgatgcagatcatccctgctgatccaggtcagcttgattcccatgagcgatctgtccctcgtgctggacaagtgtggttcccagattctgcaaccaagaccgctcaggcattattagacttcaaccgtgaaggattgcctctgttcatcctggctaattggagaggcttctctggtggacaaagagatctctttgaaggaattcttcaggctgggtcaacaattgtcgagaaccttaggacatctaatcagcctgcttttgtgtacattcctatggctggagagcttcgtggaggagcttgggttgtggtcgatagcaaaataaatccagaccgcattgagtgttatgctgaaaggactgccaaaggtaatgttctcgaacctcaagggttaattgaaatcaagttcaggtcagaggaactccaagactgtatgggtaggcttgacccagagttgataaatctgaaagcaaaactccaagatgtaaatcatggaaatggaagtctaccagacatagaagggattcggaagagtatagaagcacgtacgaaacagttgctgcctttatatacccagattgcaatacggtttgctgaattgcatgatacttccctaagaatggcagctaaaggtgtgattaagaaagttgtagactgggaagaatcacgctcgttcttctataaaaggctacggaggaggatcgcagaagatgttcttgcaaaagaaataaggcagatagtcggtgataaatttacgcaccaattagcaatggagctcatcaaggaatggtaccttgcttctcaggccacaacaggaagcactggatgggatgacgatgatgcttttgttgcctggaaggacagtcctgaaaactacaaggggcatatccaaaagcttagggctcaaaaagtgtctcattcgctctctgatcttgctgactccagttcagatctgcaagcattctcgcagggtctttctacgctattagataagatggatccctctcagagagcgaagtttgttcaggaagtcaagaaggtccttgattgatgataccaacacatccaacacaatgtgtgcatgtcacatctttttgttctagtacatacatagaaggatattgcttggtcttgattgatcatgtctgatttaagtcgactattatttcttggatttttcttttggacctggtgctatggttgatggatgtatattggatatgtgcgttctgccaggtgtaagcacaaaggtttagacagaccgagagcaagagcgagtgaacctgttctggttttgcagtggttcagtaaggcagaaagttgttaaaccgtagttctgagatgtattaccagtggcgccatgctgtacttttagggtgtataatgcggatac

SEQ ID NO: 12 - protein, 2325 aa, Zea mays
MSQLGLAAAASKALPLLPNRQRSSAGTTFSSSSLSRPLNRRKSRTRSLRDGGDGVSDAKKHSQSVRQGLAGIIDLPSEAPSEVDISHGSEDPRGPTDSYQMNGIINETHNGRHASVSKVVEFCAALGGKTPIHSILVANNGMAAAKFMRSVRTWANDTFGSEKAIQLIAMATPEDMRINAEHIRIADQFVEVPGGTNNNNYANVQLIVEMAQKLGVSAVWPGWGHASENPELPDALTAKGIVFLGPPASSMNALGDKVGSALIAQAAGVPTLARSGSHVEVPLECCLDAIPEEMYRKACVTTTEEAVASCQVVGYPAMIKASWGGGGKGIRKVHNDDEVRALFKQVQGEVPGSPIFVMRLASQSRHLEVQLLCDQYGNVAALHSRDCSVQRRHQKIIEEGPVTVAPRETVKALEQAARRLAKAVGYVGAATVEYLYSMETGDYYFLELNPRLQVEHPVTEWIAEVNLPAAQVAVGMGIPLWQIPEIRRFYGMDYGGGYDIWRKTAALATPFNFDEVDSQWPKGHCVAVRITSEDPDDGFKPTGGKVKEISFKSKPNVWAYFSVKSGGGIHEFADSQFGHVFAYGLSRSAAITNMTLALKEIQIRGEIHSNVDYTVDLLNASDFRENKIHTGWLDTRIAMRVQAERPPWYISVVGGALYKTVTTNAATVSEYVSYLTKGQIPPKHISLVNSTVNLNIEGSKYTIETVRTGHGSYRLRMNDSTVEANVQSLCDGGLLMQLDGNSHVIYAEEEAGGTRLQIDGKTCLLQNDHDPSKLLAETPCKLLRFLVADGAHVDADVPYAEVEVMKMCMPLLSPASGVIHCMMSEGQALQAGDLIARLDLDDPSAVKRAEPFDGIFPQMELPVAVSSQVHKRYAASLNAARMVLAGYEHNINEVVQDLVCCLDNPELPFLQWDELMSVLATRLPRNLKSELEDKYKEYKLNFYHGKNEDFPSKLLRDIIEENLSYGSEKEKATNERLVEPLMNLLKSYEGGRESHAHFVVKSLFEEYLTVEELFSDGIQSDVIETLRHQHSKDLQKVVDIVLSHQGVRNKAKLVTALMEKLVYPNPGGYRDLLVRFSSLNHKRYYKLALKASELLEQTKLSELRASVARSLSDLGMHKGEMSIKDNMEDLVSAPLPVEDALISLFDYSDRTVQQKVIETYISRLYQPHLVKDSIQMKFKESGAITFWEFYEGHVDTRNGHGAIIGGKRWGAMVVLKSLESASTAIVAALKDSAQFNSSEGNMMHIALLSAENESNISGISSDDQAQHKMEKLSKILKDTSVASDLQAAGLKVISCIVQRDEARMPMRHTFLWLDDKSCYEEEQILRHVEPPLSTLLELDKLKVKGYNEMKYTPSRDRQWHIYTLRNTENPKMLHRVFFRTIVRQPNAGNKFTSAQISDAEVGCPEESLSFTSNSILRSLMTAIEELELHAIRTGHSHMYLCILKEQKLLDLIPFSGSTIVDVGQDEATACSLLKSMALKIHELVGARMHHLSVCQWEVKLKLDCDGPASGTWRVVTTNVTGHTCTIDIYREVEEIESQKLVYHSATSSAGPLHGVALNNPYQPLSVIDLKRCSARNNRTTYCYDFPLAFETALQKSWQSNGSTVSEGNENSKSYVKATELVFAEKHGSWGTPIIPMERPAGLNDIGMVAWIMEMSTPEFPNGRQIIVVANDITFRAGSFGPREDAFFETVTNLACERKLPLIYLAANSGARIGIADEVKSCFRVGWSDEGSPERGFQYIYLTEEDYARISSSVIAHKLELDSGEIRWIIDSVVGKEDGLGVENIHGSAAIASAYSRAYEETFTLTFVTGRTVGIGAYLARLGIRCIQRLDQPIILTGFSALNKLLGREVYSSHMQLGGPKIMATNGVVHLTVPDDLEGVSNILRWLSYVPANIGGPLPITKPLDPPDRPVAYIPENTCDPRAAICGVDDSQGKWLGGMFDKDSFVETFEGWAKTVVTGRAKLGGIPVGVIAVETQTMMQIIPADPGQLDSHERSVPRAGQVWFPDSATKTAQALLDFNREGLPLFILANWRGFSGGQRDLFEGILQAGSTIVENLRTSNQPAFVYIPMAGELRGGAWVVVDSKINPDRIECYAERTAKGNVLEPQGLIEIKFRSEELQDCMGRLDPELINLKAKLQDVNHGNGSLPDIEGIRKSIEARTKQLLPLYTQIAIRFAELHDTSLRMAAKGVIKKVVDWEESRSFFYKRLRRRIAEDVLAKEIRQIVGDKFTHQLAMELIKEWYLASQATTGSTGWDDDDAFVAWKDSPENYKGHIQKLRAQKVSHSLSDLADSSSDLQAFSQGLSTLLDKMDPSQRAKFVQEVKKVLD

SEQ ID NO: 13 - DNA, 7464 bp, Zea mays
  variation 7319: note = n is a, c, g, or t
  source 1..7464: mol_type = genomic DNA
ggtcttcaattgtgctgtctgggccacggaacgacaatgtcacagcttggattagccgcagctgcctcaaaggccttgccactactccctaatcgccagagaagttcagctgggactacattctcatcatcttcattatcgaggcccttaaacagaaggaaaagccatactcgttcactccgtgatggcggagatggggtatcagatgccaaaaagcacagccagtctgttcgtcaaggtcttgctggcattatcgacctcccaagtgaggcaccttccgaagtggatatttcacatggatctgaggatcctagggggccaacagattcttatcaaatgaatgggattatcaatgaaacacataatggaagacatgcctcagtgtccaaggttgttgaattttgtgcggcactaggtggcaaaacaccaattcacagtatattagtggccaacaatggaatggcagcagcaaaatttatgaggagtgtccggacatgggctaatgatacttttggatctgagaaggcaattcaactcatagctatggcaactccggaagacatgaggataaatgcagaacacattagaattgctgaccaattcgtagaggtgcctggtggaacaaacaataataactacgccaatgttcaactcatagtggggatggcacaaaaactaggtgtttctgctgtttggcctggttggggtcatgcttctgagaatcctgaactgccagatgcattgaccgcaaaagggatcgtttttcttggcccacctgcatcatcaatgaatgctttgggagataaggtcggctcagctctcattgctcaagcagccggggtcccaactcttgcttggagtggatcacatgttgaagttccattagagtgctgcttagacgcgatacctgaggagatgtatagaaaagcttgcgttactaccacagaggaagcagttgcaagttgtcaagtggttggttatcctgccatgattaaggcatcctggggaggtggtggtaaaggaataagaaaggttcataatgatgatgaggttagagcgctgtttaagcaagtacaaggtgaagtccctggctccccaatatttgtcatgaggcttgcatcccagagtcggcatcttgaagttcagttgctttgtgatcaatatggtaatgtagcagcacttcacagtcgtgattgcagtgtgcaacggcgacaccagaagattattgaagaaggtccagttactgttgctcctcgtgagacagttaaagcacttgagcaggcagcaaggaggcttgctaaggctgtgggttatgttggtgctgctactgttgagtatctttacagcatggaaactggagactactattttctggaacttaatccccgactacaggttgagcatccagtcactgagtggatagctgaagtgaatctgcctgcagctcaagttgctgttggaatgggcatacctctttggcagattccagaaatcagacgtttctatggaatggactatggaggagggtatgacatttggaggaaaacagcagctcttgctacaccatttaattttgatgaagtagattctcaatggccaaagggccattgtgtagcagttagaattactagtgaggacccagatgatggtttcaaacctactggtgggaaagtgaaggagataagttttaaaagcaagcctaatgtttgggcctacttctcagtaaagtctggtggaggcattcatgaatttgctgattctcagtttggacatgcttttgcatatggactctctagaccagcagctataacaaacatgtctcttgcattaaaagagattcagattcgtggagaaattcattcaaatgttgattacacagttgacctcttaaacgcttcagacttcagagaaaacaagatccacactggttggctggatacaagaatagctatgcgtgttcaagctgagaggcccccatggtatatctcagtggttggaggtgctttatataaaacagtaaccaccaatgcagccactgtttctgaatatgttagttatctcaccaagggccatattccaccaaagcatatatcccttgtcaattctacagttaatttgaatatagaagggagcaaatacacaattgaaactgtaaggactggacatggtagctacaggttgagaatgaatgattcaacagttgaagcgaatgtacaatctttatgtgatggtggcctcttaatgcagttggatggaaacagccatgtaatttatgcagaagaagaagctggtggtacacggcttcagattgatggaaagacatgtttattgcagaatgaccatgatccatcgaagttattagctgagacaccctgcaaacttcttcgtttcttggttgctgatggtgctcatgttgatgcggatgtaccatacgcggaagttgaggttatgaagatgtgcatgcctctcttgtcacctgcttctggtgtcattcattgtatgatgtctgagggccaggcattgcaggctggtgatcttatagcaaggttggatcttgatgacccttctgctgtgaaaagagctgagccatttgatggaatatttccacaaatggagctccctgttgctgtctctagtcaagtacacaaaagatatgctgcaagtttgaatgctgctcgaatggtccttgcaggatatgagcacaatattaatgaagtcgttcaagatttggtatgctgcctggacaaccctgagcttcctttcctacagtgggatgaacttatgtctgttctagcaacgaggcttccaagaaatctcaagagtgagttagaggataaatacaaggaatacaagttgaatttttaccatggaaaaaacgaggactttccatccaagttgctaagagacatcattgaggaaaatctttcttatggttcagagaaggaaaaggctacaaatgagaggcttgttgagcctcttatgaacctactgaagtcatatgagggtgggagagagagccatgcacattttgttgtcaagtctcttttcgaggagtatcttacagtggaagaactttttagtgatggcattcagtctgacgtgattgaaacattgcggcatcagcacagtaaagacctgcagaaggttgtagacattgtgttgtctcaccagggtgtgaggaacaaagctaagcttgtaacggcacttatggaaaagctggtttatccaaatcctggtggttacagggatctgttagttcgcttttcttccctcaatcataaaagatattataagttggcccttaaagcaagtgaacttcttgaacaaaccaaactaagtgaactccgtgcaagcgttgcaagaagcctttcggatctggggatgcataagggagaaatgagtattaaggataacatggaagatttagtctctgccccattacctgttgaagatgctctgatttctttgtttgattacagtgatcgaactgttcagcagaaagtgattgagacatacatatcacgattgtaccagcctcatcttgtaaaggatagcatccaaatgaaattcaaggaatctggtgctattactttttgggaattttatgaagggcatgttgatactagaaatggacatggggctattattggtgggaagcgatggggtgccatggtcgttctcaaatcacttgaatctgcgtcaacagccattgtggctgcattaaaggattcggcacagttcaacagctctgagggcaacatgatgcacattgcattattgagtgctgaaaatgaaagtaatataagtggaataagcagtgatgatcaagctcaacataagatggaaaagcttagcaagatactgaaggatactagcgttgcaagtgatctccaagctgctggtttgaaggttataagttgcattgttcaaagagatgaagctcgcatgccaatgcgccacacattcctctggttggatgacaagagttgttatgaagaagagcagattctccggcatgtggagcctcccctctctacacttcttgaattggataagttgaaggtgaaaggatacaatgaaatgaagtatactccttcgcgtgaccgccaatggcatatctacacactaagaaatactgaaaaccccaaaatgttgcatagggtgtttttccgaactattgtcaggcaacccaatgcaggcaacaagtttagatcggctcagatcagcgacgctgaggtaggatgtcccgaagaatctctttcatttacatcaaatagcatcttaagatcattgatgactgctattgaagaattagagcttcatgcaattaggacaggtcattctcacatgtatttgtgcatactgaaagagcaaaagcttcttgacctcattccattttcagggagtacaattgttgatgttggccaagatgaagctaccgcttgttcacttttaaaatcaatggctttgaagatacatgagcttgttggtgcaaggatgcatcatctgtctgtatgccagtgggaggtgaaactcaagttggactgtgatggccctgcaagtggtacctggagagttgtaactacaaatgttactggtcacacctgcaccattgatatataccgagaagtggaggaaatagaatcacagaagttagtgtaccattcagccagttcgtcagctggaccattgcatggtgttgcactgaataatccatatcaacctttgagtgtgattgatctaaagcgctgctctgctaggaacaacagaacaacatattgctatgattttccgctggcctttgaaactgcactgcagaagtcatggcagtccaatggctctactgtttctgaaggcaatgaaaatagtaaatcctacgtgaaggcaactgagctagtgtttgctgaaaaacatgggtcctggggcactcctataattccgatggaacgccctgctgggctcaacgacattggtatggtcgcttggatcatggagatgtcaacacctgaatttcccaatggcaggcagattattgttgtagcaaatgatatcactttcagagctggatcatttggcccaagggaagatgcattttttgaaactgtcactaacctggcttgcgaaaggaaacttcctcttatatacttggcagcaaactctggtgctaggattggcatagctgatgaagtaaaatcttgcttccgtgttggatggtctgacgaaggcagtcctgaacgagggtttcagtacatctatctgactgaagaagactatgctcgcattagctcttctgttatagcacataagctggagctagatagtggtgaaattaggtggattattgactctgttgtgggcaaggaggatgggcttggtgtcgagaacatacatggaagtgctgctattgccagtgcttattctagggcatatgaggagacatttacacttacatttgtgactgggcggactgtaggaataggagcttatcttgctcgacttggtatacggtgcatacagcgtcttgaccagcctattattttaacagggttttctgccctgaacaagctccttgggcgggaagtgtacagctcccacatgcagcttggtggtcctaagatcatggcgaccaatggtgttgtccacctcactgttccagatgtccttgaaggtgtttccaatatattgaggtggctcagctatgttcctgcaaacattggtggacctcttcctattaccaaacctctggaccctccagacagacctgttgcttacatccctgagaacacatgcgatccacgtgcagctatctgtggtgtagatgacagccaagggaaatggttgggtggtatgtttgacaaagacagctttgtggagacatttgaaggatgggcaaaaacagtggttactggcagagcaaagcttggaggaattcctgtgggcgtcatagctgtggagacacagaccatgatgcagatcatccctgctgatccaggtcagcttgattcccatgagcgatctgtccctcgtgctggacaagtgtggttcccagattctgcaaccaagaccgctcaggcattattagacttcaaccgtgaaggattgcctctgttcatcctggctaattggagaggcttctctggtggacaaagagatctctttgaaggaattcttcaggctgggtcaacaattgtcgagaaccttaggacatataatcagcctgcttttgtgtacattcctatggctggagagcttcgtggaggagcttgggttgtggtcgatagcaaaataaatccagaccgcattgagtgttatgctgaaaggactgccaaaggtaatgttctcgaacctcaagggttaattgaaatcaagttcaggtcagaggaactccaagactgtatgggtaggcttgacccagagttgataaatctgaaagcaaaactccaagatgtaaatcatggaaatggaagtctaccagacatagaagggattcggaagagtatagaagcacgtacgaaacagttgctgcctttatatacccagattgcaatacggtttgctgaattgcatgatacttccctaagaatggcagctaaaggtgtgattaagaaagttgtagactgggaagaatcacgctcgttcttctataaaaggctacggaggaggatcgcagaagatgttcttgcaaaagaaataaggcagatagtcggtgataaatttacgcaccaattagcaatggagctcatcaaggaatggtaccttgcttctcaggccacaacaggaagcactggatgggatgacgatgatgcttttgttgcctggaaggacagtcctgaaaactacaaggggcatatccaaaagcttagggctcaaaaagtgtctcattcgctctctgatcttgctgactccagttcagatctgcaagcattctcgcagggtctttctacgctattagataagatggatccctctcagagagcgaagtttgttcaggaagtcaagaaggtccttgattgatgataccaacacatccaacacaatgtgtgcatgtcacatctttttgttctagtacatacatagaaggatattgcttggtcttgattgatcatgtctgatttaagtcgactattatttcttggaattttcttttggacctggtgctatggttgatggatgtatattggatatgtgcgttctgccaggtgtaagcacaaaggtttagacarammrararcaagagcgagtgaacctgttctggttttgcagtggttcagtaaggcagaaagttgttaaaccgtagttctgagatgtattaccagtgncgccatgctgtacttttagggtgtataatgcggatacaaataaacaatttagcggttcattaaagtttgaactcaaataacatgttctttgtaagcatatgtaccgtacctctacgtgaaataaagttgttgaattagcattcga

SEQ ID NO: 14 - protein, 2325 aa, Zea mays
MSQLGLAAAASKALPLLPNRQRSSAGTTFSSSSLSRPLNRRKSHTRSLRDGGDGVSDAKKHSQSVRQGLAGIIDLPSEAPSEVDISHGSEDPRGPTDSYQMNGIINETHNGRHASVSKVVEFCAALGGKTPIHSILVANNGMAAAKFMRSVRTWANDTFGSEKAIQLIAMATPEDMRINAEHIRIADQFVEVPGGTNNNNYANVQLIVGMAQKLGVSAVWPGWGHASENPELPDALTAKGIVFLGPPASSMNALGDKVGSALIAQAAGVPTLAWSGSHVEVPLECCLDAIPEEMYRKACVTTTEEAVASCQVVGYPAMIKASWGGGGKGIRKVHNDDEVRALFKQVQGEVPGSPIFVMRLASQSRHLEVQLLCDQYGNVAALHSRDCSVQRRHQKIIEEGPVTVAPRETVKALEQAARRLAKAVGYVGAATVEYLYSMETGDYYFLELNPRLQVEHPVTEWIAEVNLPAAQVAVGMGIPLWQIPEIRRFYGMDYGGGYDIWRKTAALATPFNFDEVDSQWPKGHCVAVRITSEDPDDGFKPTGGKVKEISFKSKPNVWAYFSVKSGGGIHEFADSQFGHAFAYGLSRPAAITNMSLALKEIQIRGEIHSNVDYTVDLLNASDFRENKIHTGWLDTRIAMRVQAERPPWYISVVGGALYKTVTTNAATVSEYVSYLTKGHIPPKHISLVNSTVNLNIEGSKYTIETVRTGHGSYRLRMNDSTVEANVQSLCDGGLLMQLDGNSHVIYAEEEAGGTRLQIDGKTCLLQNDHDPSKLLAETPCKLLRFLVADGAHVDADVPYAEVEVMKMCMPLLSPASGVIHCMMSEGQALQAGDLIARLDLDDPSAVKRAEPFDGIFPQMELPVAVSSQVHKRYAASLNAARMVLAGYEHNINEVVQDLVCCLDNPELPFLQWDELMSVLATRLPRNLKSELEDKYKEYKLNFYHGKNEDFPSKLLRDIIEENLSYGSEKEKATNERLVEPLMNLLKSYEGGRESHAHFVVKSLFEEYLTVEELFSDGIQSDVIETLRHQHSKDLQKVVDIVLSHQGVRNKAKLVTALMEKLVYPNPGGYRDLLVRFSSLNHKRYYKLALKASELLEQTKLSELRASVARSLSDLGMHKGEMSIKDNMEDLVSAPLPVEDALISLFDYSDRTVQQKVIETYISRLYQPHLVKDSIQMKFKESGAITFWEFYEGHVDTRNGHGAIIGGKRWGAMVVLKSLESASTAIVAALKDSAQFNSSEGNMMHIALLSAENESNISGISSDDQAQHKMEKLSKILKDTSVASDLQAAGLKVISCIVQRDEARMPMRHTFLWLDDKSCYEEEQILRHVEPPLSTLLELDKLKVKGYNEMKYTPSRDRQWHIYTLRNTENPKMLHRVFFRTIVRQPNAGNKFRSAQISDAEVGCPEESLSFTSNSILRSLMTAIEELELHAIRTGHSHMYLCILKEQKLLDLIPFSGSTIVDVGQDEATACSLLKSMALKIHELVGARMHHLSVCQWEVKLKLDCDGPASGTWRVVTTNVTGHTCTIDIYREVEEIESQKLVYHSASSSAGPLHGVALNNPYQPLSVIDLKRCSARNNRTTYCYDFPLAFETALQKSWQSNGSTVSEGNENSKSYVKATELVFAEKHGSWGTPIIPMERPAGLNDIGMVAWIMEMSTPEFPNGRQIIVVANDITFRAGSFGPREDAFFETVTNLACERKLPLIYLAANSGARIGIADEVKSCFRVGWSDEGSPERGFQYIYLTEEDYARISSSVIAHKLELDSGEIRWIIDSVVGKEDGLGVENIHGSAAIASAYSRAYEETFTLTFVTGRTVGIGAYLARLGIRCIQRLDQPIILTGFSALNKLLGREVYSSHMQLGGPKIMATNGVVHLTVPDVLEGVSNILRWLSYVPANIGGPLPITKPLDPPDRPVAYIPENTCDPRAAICGVDDSQGKWLGGMFDKDSFVETFEGWAKTVVTGRAKLGGIPVGVIAVETQTMMQIIPADPGQLDSHERSVPRAGQVWFPDSATKTAQALLDFNREGLPLFILANWRGFSGGQRDLFEGILQAGSTIVENLRTYNQPAFVYIPMAGELRGGAWVVVDSKINPDRIECYAERTAKGNVLEPQGLIEIKFRSEELQDCMGRLDPELINLKAKLQDVNHGNGSLPDIEGIRKSIEARTKQLLPLYTQIAIRFAELHDTSLRMAAKGVIKKVVDWEESRSFFYKRLRRRIAEDVLAKEIRQIVGDKFTHQLAMELIKEWYLASQATTGSTGWDDDDAFVAWKDSPENYKGHIQKLRAQKVSHSLSDLADSSSDLQAFSQGLSTLLDKMDPSQRAKFVQEVKKVLD

SEQ ID NO: 15 - DNA, 7271 bp, Setaria italica
  source 1..7271: mol_type = genomic DNA
tgtgctgtctgggctacggaacgacaatgtcgcaacttggattagctgcagctgcctcaaaggcgctgccactacttcctaatcgccatagaacttcagctggaactacattcccatcacctgtatcatcgcggccctcaaaccgaaggaaaagccgcactcgttcacttcgtgatggaggagatggggtatcagatgccaaaaagcacaaccagtctgtccgtcaaggtcttgctggcatcatcgacctcccaaatgaggcaacatcggaagtggatatttctcatggatccgaggatcccagggggccaaccgattcatatcaaatgaatgggattgtaagtgaagcacataatggcagacatgcctcagtgtccaaggttgttgaattttgtgcggcgctaggtggcaaaacaccaattcacagtatactagtggccaacaatggaatggcagcagcaaagttcatgaggagtgtccggacatgggctaatgatacttttggatcggagaaggcgattcagctcatagctatggcaactccagaagacatgaggataaatgcagaacacattagaattgctgatcaatttgtggaggtgcctggtggaacaaacaataacaactatgcaaatgttcaactcatagtggaggtagcagaaagaataggtgtttctgctgtttggcctggttggggtcatgcttctgagaatcctgaacttccagatgcattgaccgcaaaaggagttgttttccttgggccacctgcggcatcaatgaatgcattgggagataaggtcggttcagctctcattgctcaagcagctggggtcccgaccctttcgtggagtggatcacatgttgaagttccattagagtgctgcttagatgcgatacctgaggaaatgtatagaaaagcttgtgttactaccacagaagaagctgttgcgagttgtcaggtggttggttatcctgccatgattaaggcatcctggggaggtggtggtaaaggaataagaaaggttcataatgacgatgaggttagagcactgtttaagcaagtacaaggtgaagtccctggctccccaatatttatcatgaggcttgcatcccagagtcgtcatcttgaagttcagttgctttgtgatcaatatggcaatgtggcagcacttcacagtcgtgattgcagtgtgcaacggcgacaccaaaagattattgaggaaggcccagttactgttgctcctcgtgagacagttaaagcgcttgagcaggcagcaaggaggcttgctaaggctgtgggttatgttggtgctgctactgttgaatacctttacagcatggagactggggaatactattttctggagcttaatcccagattacaggtcgagcatccagtcactgagtggattgctgaagtaaatcttcctgcagctcaagttgcagttggaatgggcatacctctttggcagattccagaaatcagacgtttcgatggaatggactatggaggaggatatgacatttggaggaaaacagcagctcttgccacaccatttaattttgatgaagtagattctcaatggccaaagggccattgtgtagcagttagaattactagcgaggatccagatgatggtttcaaacctactggtgggaaagtgaaggagataagttttaaaagcaagcctaatgtttgggcctacttctcagtaaagtctggtggaggcattcatgaatttgttgattctcagtttgggcatgtttttgcatatgggctctctagatcagcagcaataacgaacatggctcttgcattaaaagagattcaaattcgtggagaaattcattcaaatgttgattacacagttgatctcttaaatgcttcagacttcagagaaaataagattcatactggctggcttgataccagaatagctatgcgtgttcaagctgagaggcccccatggtatatttcagtggttggaggagctctatataaaacagtaactgccaatgcagccactgtttctgattatgtcagttatctcaccaagggccagattccaccaaagcatatatcccttgtcagttcaacagttaatctgaatatcgaagggagcaaatacacagttgaaactgtaaggactggacatggtagctacagattacgaatgaatgattcagcaattgaagcgaatgtacaatccttatgtgatggaggcctcttaatgcagttggatggaaatagccatgtaatttacgcggaagaagaagctggtggtacacgacttctgattgatggaaagacatgcttgttacagaatgatcatgatccatcaaagttattagctgagacaccctgcaaacttcttcggttcttggttgctgatggtgcccatgttgatgctgatgtaccatatgcggaagttgaggttatgaaaatgtgcatgcctctcttgtcgcctgcttctggtgtcattcatgttatgatgtctgagggccaggcattgcaggctggtgatcttatagcaaggctggatcttgatgacccttctgctgtgaaaagagctgaaccatttcatggaatatttccacaaatggaccttcctgttgctgcctctagccaagtacacaaaagatatgctgcaagttggaatgctgctcgaatggtccttgcaggatacgagcataatatcaatgaagttgtacaagatttggtatgctgcctggatgatcccgagcttcccttcctacagtgggatgaacttatgtcagttctagcaactaggcttccaagaaatcttaagagtgagttagaggataaatacatggaatacaagttgaacttttaccatgggaaaaacaaggacttcccgtccaagctgctgagagacatcattgaggcaaatcttgcatatggttcagagaaggaaaaagctacgaatgagaggcttattgagcctcttatgagcctacttaagtcatatgagggtgggagagaaagccatgctcattttgttgtcaagtcccttttcaaggagtaccttgctgtggaagaacttttcagtgatgggattcagtctgatgtgattgaaaccctgcgtcatcagcacagtaaagacttgcagaaggttgtagacattgtgttgtctcaccagggtgtgaggaacaaagctaagcttgtaacagcacttatggaaaagctggtttatccaaatcctgctgcttacagggatctgttggttcgcttttcttcactcaatcataaaagatattataagttggcccttaaagcaagcgaacttcttgaacaaactaaactaagtgaactccgtgcaagcatcgcaagaagcctttctgatctggggatgcataagggagaaatgactattgaagatagcatggaagatttagtctctgccccattacctgtcgaagatgcacttatttctttgtttgattacagtgatccaactgttcagcagaaagtgatcgagacatacatatctcgattgtatcagcctcttcttgtgaaagatagcatccaagtgaaatttaaggaatctggtgcctttgctttatgggaattttctgaagggcatgttgatactaaaaatggacaagggaccgttcttggtcgaacaagatggggtgccatggtagctgtcaaatcagttgaatctgcacgaacagccattgtagctgcattaaaggattcggcacagcatgccagctctgagggcaacatgatgcacattgccttattgagtgctgaaaatgaaaataatatcagtgatgatcaagctcaacataggatggaaaaacttaacaagatactcaaggatactagtgtcgcaaatgatcttcgagctgctggtttgaaggttataagttgcattgttcaaagagatgaagcacgcatgccaatgcgccacacattactctggtcagatgaaaagagttgttatgaggaagagcagattcttcggcatgtggagcctcccctctccatgcttcttgaaatggataagttgaaagtgaaaggatacaatgaaatgaagtatactccatcacgtgatcgtcaatggcatatctacacactaagaaatactgaaaaccccaaaatgttgcatagggtatttttccgaactattgtcaggcaacccaatgcaggcaacaagtttatatcagcccaaattggcgacactgaagtaggaggtcctgaggaatctttgtcatttacatctaatagcattttaagagccttgatgactgctattgaagaattagagcttcatgcaattaggactgatcattctcacatgtatttgtgcatattgaaagaacaaaagcttcttgatctcattccgttttcagggagcacaatcgtcgatgttgtccaagacgaagctactgcttgttcacttttaaaatcaatggctttgaagatacacgaacttgttggtgcacagatgcatcatctttctgtatgccagtgggaggtgaaactcaagttgtactgcgatgggcctgccagtggcacctggagagttgtaactacaaatgttactagtcacacttgcaccgttgatatctaccgggaagtggaagatactgaatcgcagaagttagtataccattcagcttctccgtcagctagtcctttgcatggtgtggccctggataatccgtatcaacctttgagtgtcattgatctaaaacactgctctgctaggaacaacagaactacatattgctatgattttccactggcatttgaaactgccctgcagaagtcatggcagtccaatggctccagtgtttctgaaggcagtgaaaatagtaggtcttatgtgaaagcaacagagctggtgtttgctgaaaaacatgggtcctggggcactcctataatttccatggagcgtcccgctgggctcaatgacattggcatggtagcttggatcttagagatgtccactcctgaatttcccaatggcaggcagattattgtcatagcaaatgatattactttcagagctggatcatttggcccaagggaagatgcgttttttgaagctgtcacgaacctggcctgcgagaggaagcttcctcttatatacttggcagcaaactccggtgctaggattggcatagccgatgaagtgaaatcttgcttccgtgttgggtggtccgatgaaggcagccctgaacggggttttcagtacatttatctgactgacgaagactatgcccgtattagcttgtctgttatagcacacaagctgcagctggataatggtgaaattaggtggattattgactctgttgtgggcaaggaggatgggcttggtgttgagaatatacatggaagtgctgctattgccagtgcttattctagggcatatgaggagacatttacacttacatttgtgactgggcggactgttggaataggagcatatcttgctcggctcggtatacggtgcatacagcgtcttgaccagcctattattttaactgggttttctgccctgaacaagcttcttgggcgggaagtgtacagctcccacatgcagttgggtggtcctaagatcatggcgaccaatggtgttgtccacttgactgtttcagatgaccttgaaggtgtttccaatatattgaggtggctcagctatgttcctgccaacattggtggacctcttcctattacaaaacctttggacccaccagacagacctgttgcatacatccctgagaacacatgtgatccgcgcgcagccattcgtggtgtagatgacagccaagggaaatggttgggtggtatgtttgacaaagacagctttgtcgagacatttgaaggatgggcgaaaacagtggttacgggcagagcaaagcttggaggaattcctgttggcgtcatagctgtggagacacaaaccatgatgcagcttatccctgctgatccaggccagcttgattcccatgagcgatctgttcctcgggctggacaagtgtggttcccagattctgcaaccaagacagctcaggcattgttggacttcaaccgtgaaggattgccgctgttcatccttgctaactggagaggattctctggtggacaaagagatctgtttgaaggaattcttcaggctgggtcaacaattgttgagaaccttaggacatacaatcagcctgcttttgtctacattcctatggctggagagctgcgtggaggagcttgggttgtggttgatagcaaaataaatccagaccgaattgagtgttatgctgagaggactgctaaaggcaatgttctggaacctcaagggttaattgaaatcaaattcagatcagaggagctccaagactgtatgggtaggcttgacccagggttgataaatctgaaagcaaaactccaaggtgcaaagcttggaaatggaagcctaacagatgtagaatcccttcagaagagtatagatgctcgtacgaaacagttgttgcctttatacacccagattgcaatacggtttgctgaattgcatgatacttccctcagaatggcagctaaaggtgtgattaagaaagttgtagattgggaagaatcacgttctttcttctacagaaggctacggaggaggatctctgaagatgttcttgcaaaagaaataagaggaatagctggtgaccacttcactcaccaatcagcagttgagctgatcaaggaatggtacttggcttctcaagccacaacaggaagcactgaatgggatgatgatgatgcttttgttgcctggaaggagaatcctgaaaactataagggatatatccaagagttaagggctcaaaaggtgtctcagtcgctctccgatcttgcagactccagttcagatctagaagcattctcacagggtctttccacattattagataagatggatccctctcagagagccaagttcattcaggaagtcaagaaggtcctgggttgatgaataccaacacattcaacacaatgtgtatgctacatgtttttgttcaagtacatacatagaaggatattgatcatatctgatctgaatcgaccatgatttgttaaaagttctgttggacctaattctgtggttggtatcagcacaaagcttgggggagctgagtgacagacagttagcaagggcacaagtgaatctgtgttctggttttgcaggggtccagtaaggcacaaagttgtttcgctatagttatgtgatgtaaccagcggttcaattctg

SEQ ID NO: 16 - protein, 2321 aa, Setaria italica
MSQLGLAAAASKALPLLPNRHRTSAGTTFPSPVSSRPSNRRKSRTRSLRDGGDGVSDAKKHNQSVRQGLAGIIDLPNEATSEVDISHGSEDPRGPTDSYQMNGIVSEAHNGRHASVSKVVEFCAALGGKTPIHSILVANNGMAAAKFMRSVRTWANDTFGSEKAIQLIAMATPEDMRINAEHIRIADQFVEVPGGTNNNNYANVQLIVEVAERIGVSAVWPGWGHASENPELPDALTAKGVVFLGPPAASMNALGDKVGSALIAQAAGVPTLSWSGSHVEVPLECCLDAIPEEMYRKACVTTTEEAVASCQVVGYPAMIKASWGGGGKGIRKVHNDDEVRALFKQVQGEVPGSPIFIMRLASQSRHLEVQLLCDQYGNVAALHSRDCSVQRRHQKIIEEGPVTVAPRETVKALEQAARRLAKAVGYVGAATVEYLYSMETGEYYFLELNPRLQVEHPVTEWIAEVNLPAAQVAVGMGIPLWQIPEIRRFDGMDYGGGYDIWRKTAALATPFNFDEVDSQWPKGHCVAVRITSEDPDDGFKPTGGKVKEISFKSKPNVWAYFSVKSGGGIHEFVDSQFGHVFAYGLSRSAAITNMALALKEIQIRGEIHSNVDYTVDLLNASDFRENKIHTGWLDTRIAMRVQAERPPWYISVVGGALYKTVTANAATVSDYVSYLTKGQIPPKHISLVSSTVNLNIEGSKYTVETVRTGHGSYRLRMNDSAIEANVQSLCDGGLLMQLDGNSHVIYAEEEAGGTRLLIDGKTCLLQNDHDPSKLLAETPCKLLRFLVADGAHVDADVPYAEVEVMKMCMPLLSPASGVIHVMMSEGQALQAGDLIARLDLDDPSAVKRAEPFHGIFPQMDLPVAASSQVHKRYAASWNAARMVLAGYEHNINEVVQDLVCCLDDPELPFLQWDELMSVLATRLPRNLKSELEDKYMEYKLNFYHGKNKDFPSKLLRDIIEANLAYGSEKEKATNERLIEPLMSLLKSYEGGRESHAHFVVKSLFKEYLAVEELFSDGIQSDVIETLRHQHSKDLQKVVDIVLSHQGVRNKAKLVTALMEKLVYPNPAAYRDLLVRFSSLNHKRYYKLALKASELLEQTKLSELRASIARSLSDLGMHKGEMTIEDSMEDLVSAPLPVEDALISLFDYSDPTVQQKVIETYISRLYQPLLVKDSIQVKFKESGAFALWEFSEGHVDTKNGQGTVLGRTRWGAMVAVKSVESARTAIVAALKDSAQHASSEGNMMHIALLSAENENNISDDQAQHRMEKLNKILKDTSVANDLRAAGLKVISCIVQRDEARMPMRHTLLWSDEKSCYEEEQILRHVEPPLSMLLEMDKLKVKGYNEMKYTPSRDRQWHIYTLRNTENPKMLHRVFFRTIVRQPNAGNKFISAQIGDTEVGGPEESLSFTSNSILRALMTAIEELELHAIRTDHSHMYLCILKEQKLLDLIPFSGSTIVDVVQDEATACSLLKSMALKIHELVGAQMHHLSVCQWEVKLKLYCDGPASGTWRVVTTNVTSHTCTVDIYREVEDTESQKLVYHSASPSASPLHGVALDNPYQPLSVIDLKHCSARNNRTTYCYDFPLAFETALQKSWQSNGSSVSEGSENSRSYVKATELVFAEKHGSWGTPIISMERPAGLNDIGMVAWILEMSTPEFPNGRQIIVIANDITFRAGSFGPREDAFFEAVTNLACERKLPLIYLAANSGARIGIADEVKSCFRVGWSDEGSPERGFQYIYLTDEDYARISLSVIAHKLQLDNGEIRWIIDSVVGKEDGLGVENIHGSAAIASAYSRAYEETFTLTFVTGRTVGIGAYLARLGIRCIQRLDQPIILTGFSALNKLLGREVYSSHMQLGGPKIMATNGVVHLTVSDDLEGVSNILRWLSYVPANIGGPLPITKPLDPPDRPVAYIPENTCDPRAAIRGVDDSQGKWLGGMFDKDSFVETFEGWAKTVVTGRAKLGGIPVGVIAVETQTMMQLIPADPGQLDSHERSVPRAGQVWFPDSATKTAQALLDFNREGLPLFILANWRGFSGGQRDLFEGILQAGSTIVENLRTYNQPAFVYIPMAGELRGGAWVVVDSKINPDRIECYAERTAKGNVLEPQGLIEIKFRSEELQDCMGRLDPGLINLKAKLQGAKLGNGSLTDVESLQKSIDARTKQLLPLYTQIAIRFAELHDTSLRMAAKGVIKKVVDWEESRSFFYRRLRRRISEDVLAKEIRGIAGDHFTHQSAVELIKEWYLASQATTGSTEWDDDDAFVAWKENPENYKGYIQELRAQKVSQSLSDLADSSSDLEAFSQGLSTLLDKMDPSQRAKFIQEVKKVLG

SEQ ID NO: 17 - DNA, 7446 bp, Setaria italica
  source 1..7446: mol_type = genomic DNA
aatggcactttgcctttgagaaaatatttaattgtgctgtctgggctacggaacgacaatgtcgcaacttggattagctgcagctgcctcaaaggcgctgccactacttcctaatcgccatagaacttcagctggaactacattcccatcacctgtatcatcgcggccctcaaaccgaaggaaaagccgcactcgttcacttcgtgatggaggagatggggtatcagatgccaaaaagcacaaccagtctgtccgtcaaggtcttgctggcatcatcgacctcccaaatgaggcaacatcggaagtggatatttctcatggatccgaggatcccagggggccaaccgattcatatcaaatgaatgggattgtaaatgaagcacataatggcagacatgcctcagtgtccaaggttgttgaattttgtgcggcgctaggtggcaaaacaccaattcacagtatactagtggccaacaatggaatggcagcagcaaagttcatgaggagtgtccggacatgggctaatgatacttttggatcggagaaggcgattcagctcatagctatggcaactccagaagacatgaggataaatgcagaacacattagaattgctgatcaatttgtagaggtgcctggtggaacaaacaataacaactatgcaaatgttcaactcatagtggaggtagcagaaagaataggtgtttctgctgtttggcctggttggggtcatgcttctgagaatcctgaacttccagatgcattgaccgcaaaaggaattgttttccttgggccacctgcggcatcaatgaatgcattgggagataaggtcggttcagctctcattgctcaagcagctggggtcccgaccctttcgtggagtggatcacatgttgaagttccattagagtgctgcttagatgcgatacctgaggaaatgtatagaaaagcttgtgttactaccacagaagaagctgttgcgagttgtcaggtggttggttatcctgccatgattaaggcatcctggggaggtggtggtaaaggaataagaaaggttcataatgacgatgaggttagagcactgtttaagcaagtacaaggtgaagtccctggctccccaatatttatcatgaggcttgcatcccagagtcgtcatcttgaagttcagttgctttgtgatcaatatggcaatgtggcagcacttcacagtcgtgattgcagtgtgcaacggcgacaccaaaagattattgaggaaggcccagttactgttgctcctcgtgagacagttaaagcgcttgagcaggcagcaaggaggcttgctaaggctgtgggttatgttggtgctgctactgttgaatacctttacagcatggagactggggaatactattttctggagcttaatcccagattacaggtcgagcatccagtcactgagtggattgctgaagtaaatcttcctgcagctcaagttgcagttggaatgggcatacctctttggcagattccagaaatcagacgtttctatggaatggactatggaggaggatatgacatttggaggaaaacagcagctcttgccacaccatttaattttgatgaagtagattctcaatggccaaagggccattgtgtagcagttagaattactagcgaggatccagatgatggtttcaaacctactggtgggaaagtgaaggagataagttttaaaagcaagcctaatgtttgggcctacttctcagtaaagtctggtggaggcattcatgaatttgctgattctcagtttgggcatgtttttgcatatgggctctctagatcagcagcaataacgaacatggctcttgcattaaaagagattcaaattcgtggagaaattcattcaaatgttgattacacagttgatctcttaaatgcttcagacttcagagaaaataagattcatactggctggcttgataccagaatagctatgcgtgttcaagctgagaggcccccatggtatatttcagtggttggaggagctctatataaaacagtaactgccaatgcagccactgtttctgattatgtcagttatctcaccaagggccagattccaccaaagcatatatcccttgtcagttcaacagttaatctgaatatcgaagggagcaaatacacagttgaaactgtaaggactggacatggtagctacagattacgaatgaatgattcagcaattgaagcgaatgtacaatctttatgtgatggaggcctcttaatgcagttggatggaaatagccatgtaatttacgcggaagaagaagctggtggtacacgacttctgattgatggaaagacatgcttgttacagaatgatcatgatccatcaaagttattagctgagacaccctgcaaacttcttcggttcttggttgctgatggtgctcatgttgatgctgatgtaccatatgcggaagttgaggttatgaaaatgtgcatgcctctcttgtcgcctgcttctggtgtcattcatgttatgatgtctgagggccaggcattgcaggctggtgatcttatagcaaggctggatcttgatgacccttctgctgtgaaaagagctgaaccatttcatggaatatttccacaaatggaccttcctgttgctgcctctagccaagtacacaaaagatatgctgcaagtttgaatgctgctcgaatggtccttgcaggatacgagcataatatcaatgaagttgtacaagatttggtatgctgcctggatgatcccgagcttcccttcctacagtgggatgaacttatgtcagttctagcaactaggcttccaagaaatcttaagagtgagttagaggataaatacatggaatacaagttgaacttttaccatgggaaaaacaaggacttcccgtccaagctgctgagagacatcattgaggcaaatcttgcatatggttcagagaaggaaaaagctacgaatgagaggcttattgagcctcttatgagcctacttaagtcatatgagggtgggagagaaagccatgctcattttgttgtcaagtcccttttcaaggagtaccttgctgtggaagaacttttcagtgatgggattcagtctgatgtgattgaaaccctgcgtcatcagcacagtaaagacttgcagaaggttgtagacattgtgttgtctcaccagggtgtgaggaacaaagctaagcttgtaacagcacttatggaaaagctggtttatccaaatcctgctgcttacagggatctgttggttcgcttttcttcactcaatcataaaagatattataagttggcccttaaagcaagcgaacttcttgaacaaactaaactaagtgaactccgtgcaagcatcgcaagaagcctttctgatctggggatgcataagggagaaatgactattgaagatagcatggaagatttagtctctgccccattacctgtcgaagatgcacttatttctttgtttgattacagtgatccaactgttcagcagaaagtgatcgagacatacatatctcgattgtatcagcctcttcttgtgaaagatagcatccaagtgaaatttaaggaatctggtgcctttgctttatgggaattttctgaagggcatgttgatactaaaaatggacaagggaccgttcttggtcgaacaagatggggtgccatggtagctgtcaaatcagttgaatctgcacgaacagccattgtagctgcattaaaggattcggcacagcatgccagctctgagggcaacatgatgcacattgccttattgagtgctgaaaatgaaaataatatcagtgatgatcaagctcaacataggatggaaaaacttaacaagatactcaaggatactagtgtcgcaaatgatcttcgagctgctggtttgaaggttataagttgcattgttcaaagagatgaagcacgcatgccaatgcgccacacattactctggtcagatgaaaagagttgttatgaggaagagcagattcttcggcatgtggagcctcccctctccatgcttcttgaaatggataagttgaaagtgaaaggatacaatgaaatgaagtatactccatcacgtgatcgtcaatggcatatctacacactaagaaatactgaaaaccccaaaatgttgcatagggtatttttccgaactattgtcaggcaacccaatgcaggcaacaagtttatatcagcccaaattggcgacactgaagtaggaggtcctgaggaatctttgtcatttacatctaatagcattttaagagccttgatgactgctattgaagaattagagcttcatgcaattaggactggtcattctcacatgtatttgtgcatattgaaagaacaaaagcttcttgatctcattccgttttcagggagcacaatcgtcgatgttggccaagacgaagctactgcttgttcacttttaaaatcaatggctttgaagatacacgaacttgttggtgcacagatgcatcatctttctgtatgccagtgggaggtgaaactcaagttgtactgcgatgggcctgccagtggcacctggagagttgtaactacaaatgttactagtcacacttgcaccattgatatctaccgggaagtggaagatactgaatcgcagaagttagtataccattcagcttctccgtcagctagtcctttgcatggtgtggccctggataatccgtatcaacctttgagtgtcattgatctaaaacgctgctctgctaggaacaacagaactacatattgctatgattttccactggcatttgaaactgccctgcagaagtcatggcagtccaatggctccagtgtttctgaaggcagtgaaaatagtaggtcttatgtgaaagcaacagagctggtgtttgctgaaaaacatgggtcctggggcactcctataatttccatggagcgtcccgctgggctcaatgacattggcatggtagcttggatcttagagatgtccactcctgaatttcccaatggcaggcagattattgtcatagcaaatgatattactttcagagctggatcatttggcccaagggaagatgcgttttttgaagctgtcacgaacctggcctgcgagaggaagcttcctcttatatacttggcagcaaactccggtgctaggattggcatagccgatgaagtgaaatcttgcttccgtgttgggtggtccgatgaaggcagccctgaacggggttttcagtacatttatctgactgacgaagactatgcccgtattagcttgtctgttatagcacacaagctgcagctggataatggtgaaattaggtggattattgactctgttgtgggcaaggaggatgggcttggtgttgagaatctacatggaagtgctgctattgccagtgcttattctagggcatatgaggagacatttacacttacatttgtgactgggcggactgttggaataggagcatatctcgctcggctcggtatacggtgcatacagcgtcttgaccagcctattattttaactgggttttctgccctgaacaagcttcttgggcgggaagtgtacagctcccacatgcagttgggtggtcctaagatcatggcgaccaatggtgttgtccacttgactgtttcagatgaccttgaaggtgtttccaatatattgaggtggctcagctatgttcctgccaacattggtggacctcttcctattacaaaacctttggacccaccagacagacctgttgcatacatccctgagaacacatgtgatccgcgcgcagccattcgtggtgtagatgacagccaagggaaatggttgggtggtatgtttgacaaagacagctttgtcgagacatttgaaggatgggcgaaaacagtggttacgggcagagcaaagcttggaggaattcctgttggtgtcatagctgtggagacacaaaccatgatgcagcttatccctgctgatccaggccagcttgattcccatgagcgatctgttcctcgggctggacaagtgtggttcccagattctgcaaccaagacagctcaggcattgttggacttcaaccgtgaaggattgccgctgttcatccttgctaactggagaggattctctggtggacaaagagatctgtttgaaggaattcttcaggctgggtcaacaattgttgagaaccttaggacatacaatcagcctgcttttgtctacattcctatggctggagagctgcgtggaggagcttgggttgtggttgatagcaaaataaatccagaccgaattgagtgttatgctgagaggactgctaaaggcaatgttcttgaacctcaagggttaattgaaatcaaattcagatcagaggagctccaagactgtatgggtaggcttgacccagagttgataaatctgaaagcaaaactccaaggtgcaaagcttggaaatggaagcctaacagatgtagaatcccttcagaagagtatagatgctcgtacgaaacagttgttgcctttatacacccagattgcaatacggtttgctgaattgcatgatacttccctcagaatggcagctaaaggtgtgattaagaaagttgtagattgggaagaatcacgttctttcttctacagaaggctacggaggaggatctctgaagatgttcttgcaaaagaaataagaggaatagctggtgaccacttcactcaccaatcagcagttgagctgatcaaggaatggtacttggcttctcaagccacaacaggaagcactgaatgggatgatgatgatgcttttgttgcctggaaggagaatcctgaaaactataagggatatatccaagagttaagggctcaaaaggtgtctcagtcgctctccgatcttgcagactccagttcagatctagaagcattctcacagggtctttccacattattagataagatggatccctctcagagagccaagttcattcaggaagtcaagaaggtcctgggttgatgaataccaacacattcaacacaatgtgtatgctacatgtttttgttcaagtacatacatagaaggatattgatcatatctgatctgaatcgaccatgatttgttaaaagttctgttggacctaattctgtggttggtatcagcacaaagcttgggggagctgagtgacagacagtcagcaagggcacaagtgaatctgtgttctggttttgcaggggtccagtaaggcacaaagttgtttcgctatagttatgtgatgtaaccagcggttcaattctgtaatttttgggtgtatcatgcggatcctagcatactgttgaggtcattaaattttgaacttgaataatatgttttgtaggcatgtgtaccactacgtgtaataaacttgttgaattagcagtctaaaaaaaaaaaaaaaaaaa

SEQ ID NO: 18 - protein, 2321 aa, Setaria italica
MSQLGLAAAASKALPLLPNRHRTSAGTTFPSPVSSRPSNRRKSRTRSLRDGGDGVSDAKKHNQSVRQGLAGIIDLPNEATSEVDISHGSEDPRGPTDSYQMNGIVNEAHNGRHASVSKVVEFCAALGGKTPIHSILVANNGMAAAKFMRSVRTWANDTFGSEKAIQLIAMATPEDMRINAEHIRIADQFVEVPGGTNNNNYANVQLIVEVAERIGVSAVWPGWGHASENPELPDALTAKGIVFLGPPAASMNALGDKVGSALIAQAAGVPTLSWSGSHVEVPLECCLDAIPEEMYRKACVTTTEEAVASCQVVGYPAMIKASWGGGGKGIRKVHNDDEVRALFKQVQGEVPGSPIFIMRLASQSRHLEVQLLCDQYGNVAALHSRDCSVQRRHQKIIEEGPVTVAPRETVKALEQAARRLAKAVGYVGAATVEYLYSMETGEYYFLELNPRLQVEHPVTEWIAEVNLPAAQVAVGMGIPLWQIPEIRRFYGMDYGGGYDIWRKTAALATPFNFDEVDSQWPKGHCVAVRITSEDPDDGFKPTGGKVKEISFKSKPNVWAYFSVKSGGGIHEFADSQFGHVFAYGLSRSAAITNMALALKEIQIRGEIHSNVDYTVDLLNASDFRENKIHTGWLDTRIAMRVQAERPPWYISVVGGALYKTVTANAATVSDYVSYLTKGQIPPKHISLVSSTVNLNIEGSKYTVETVRTGHGSYRLRMNDSAIEANVQSLCDGGLLMQLDGNSHVIYAEEEAGGTRLLIDGKTCLLQNDHDPSKLLAETPCKLLRFLVADGAHVDADVPYAEVEVMKMCMPLLSPASGVIHVMMSEGQALQAGDLIARLDLDDPSAVKRAEPFHGIFPQMDLPVAASSQVHKRYAASLNAARMVLAGYEHNINEVVQDLVCCLDDPELPFLQWDELMSVLATRLPRNLKSELEDKYMEYKLNFYHGKNKDFPSKLLRDIIEANLAYGSEKEKATNERLIEPLMSLLKSYEGGRESHAHFVVKSLFKEYLAVEELFSDGIQSDVIETLRHQHSKDLQKVVDIVLSHQGVRNKAKLVTALMEKLVYPNPAAYRDLLVRFSSLNHKRYYKLALKASELLEQTKLSELRASIARSLSDLGMHKGEMTIEDSMEDLVSAPLPVEDALISLFDYSDPTVQQKVIETYISRLYQPLLVKDSIQVKFKESGAFALWEFSEGHVDTKNGQGTVLGRTRWGAMVAVKSVESARTAIVAALKDSAQHASSEGNMMHIALLSAENENNISDDQAQHRMEKLNKILKDTSVANDLRAAGLKVISCIVQRDEARMPMRHTLLWSDEKSCYEEEQILRHVEPPLSMLLEMDKLKVKGYNEMKYTPSRDRQWHIYTLRNTENPKMLHRVFFRTIVRQPNAGNKFISAQIGDTEVGGPEESLSFTSNSILRALMTAIEELELHAIRTGHSHMYLCILKEQKLLDLIPFSGSTIVDVGQDEATACSLLKSMALKIHELVGAQMHHLSVCQWEVKLKLYCDGPASGTWRVVTTNVTSHTCTIDIYREVEDTESQKLVYHSASPSASPLHGVALDNPYQPLSVIDLKRCSARNNRTTYCYDFPLAFETALQKSWQSNGSSVSEGSENSRSYVKATELVFAEKHGSWGTPIISMERPAGLNDIGMVAWILEMSTPEFPNGRQIIVIANDITFRAGSFGPREDAFFEAVTNLACERKLPLIYLAANSGARIGIADEVKSCFRVGWSDEGSPERGFQYIYLTDEDYARISLSVIAHKLQLDNGEIRWIIDSVVGKEDGLGVENLHGSAAIASAYSRAYEETFTLTFVTGRTVGIGAYLARLGIRCIQRLDQPIILTGFSALNKLLGREVYSSHMQLGGPKIMATNGVVHLTVSDDLEGVSNILRWLSYVPANIGGPLPITKPLDPPDRPVAYIPENTCDPRAAIRGVDDSQGKWLGGMFDKDSFVETFEGWAKTVVTGRAKLGGIPVGVIAVETQTMMQLIPADPGQLDSHERSVPRAGQVWFPDSATKTAQALLDFNREGLPLFILANWRGFSGGQRDLFEGILQAGSTIVENLRTYNQPAFVYIPMAGELRGGAWVVVDSKINPDRIECYAERTAKGNVLEPQGLIEIKFRSEELQDCMGRLDPELINLKAKLQGAKLGNGSLTDVESLQKSIDARTKQLLPLYTQIAIRFAELHDTSLRMAAKGVIKKVVDWEESRSFFYRRLRRRISEDVLAKEIRGIAGDHFTHQSAVELIKEWYLASQATTGSTEWDDDDAFVAWKENPENYKGYIQELRAQKVSQSLSDLADSSSDLEAFSQGLSTLLDKMDPSQRAKFIQEVKKVLG

SEQ ID NO: 19 - DNA, 7630 bp, Setaria italica
  source 1..7630: mol_type = genomic DNA
ccgccctcctggctcgcccccacccctcgggatatccgcctcgcctcgcctccactccacccggcgcctcctctcccctcctctgctccgccccgccgccgcaaggatccaaaccccgcgcgtcgccttctccgccgcctccctctttctccccgagatttcccaggagtttttgctctcttttaatggcactttgcctttgagaaaatatttaattgtgctgtctgggctacggaacgacaatgtcgcaacttggattagctgcagctgcctcaaaggcgctgccactacttcctaatcgccatagaacttcagctggaactacattcccatcacctgtatcatcgcggccctcaaaccgaaggaaaagccgcactcgttcacttcgtgatggaggagatggggtatcagatgccaaaaagcacaaccagtctgtccgtcaaggtcttgctggcatcatcgacctcccaaatgaggcaacatcggaagtggatatttctcatggatccgaggatcccagggggccaaccgattcatatcaaatgaatgggattgtaaatgaagcacataatggcagacatgcctcagtgtccaaggttgttgaattttgtgcggcgctaggtggcaaaacaccaattcacagtatactagtggccaacaatggaatggcagcagcaaagttcatgaggagtgtccggacatgggctaatgatacttttggatcggagaaggcgattcagctcatagctatggcaactccagaagacatgaggataaatgcagaacacattagaattgctgatcaatttgtagaggtgcctggtggaacaaacaataacaactatgcaaatgttcaactcatagtggaggtagcagaaagaataggtgtttctgctgtttggcctggttggggtcatgcttctgagaatcctgaacttccagatgcattgaccgcaaaaggaattgttttccttgggccacctgcggcatcaatgaatgcattgggagataaggtcggttcagctctcattgctcaagcagctggggtcccgaccctttcgtggagtggatcacatgttgaagttccattagagtgctgcttagatgcgatacctgaggaaatgtatagaaaagcttgtgttactaccacagaagaagctgttgcgagttgtcaggtggttggttatcctgccatgattaaggcatcctggggaggtggtggtaaaggaataagaaaggttcataatgacgatgaggttagagcactgtttaagcaagtacaaggtgaagtccctggctccccaatatttatcatgaggcttgcatcccagagtcgtcatcttgaagttcagttgctttgtgatcaatatggcaatgtggcagcacttcacagtcgtgattgcagtgtgcaacggcgacaccaaaagattattgaggaaggcccagttactgttgctcctcgtgagacagttaaagcgcttgagcaggcagcaaggaggcttgctaaggctgtgggttatgttggtgctgctactgttgaatacctttacagcatggagactggggaatactattttctggagcttaatcccagattacaggtcgagcatccagtcactgagtggattgctgaagtaaatcttcctgcagctcaagttgcagttggaatgggcatacctctttggcagattccagaaatcagacgtttctatggaatggactatggaggaggatatgacatttggaggaaaacagcagctcttgccacaccatttaattttgatgaagtagattctcaatggccaaagggccattgtgtagcagttagaattactagcgaggatccagatgatggtttcaaacctactggtgggaaagtgaaggagataagttttaaaagcaagcctaatgtttgggcctacttctcagtaaagtctggtggaggcattcatgaatttgctgattctcagtttgggcatgtttttgcatatgggctctctagatcagcagcaataacgaacatggctcttgcattaaaagagattcaaattcgtggagaaattcattcaaatgttgattacacagttgatctcttaaatgcttcagacttcagagaaaataagattcatactggctggcttgataccagaatagctatgcgtgttcaagctgagaggcccccatggtatatttcagtggttggaggagctctatataaaacagtaactgccaatgcagccactgtttctgattatgtcagttatctcaccaagggccagattccaccaaagcatatatcccttgtcagttcaacagttaatctgaatatcgaagggagcaaatacacagttgaaactgtaaggactggacatggtagctacagattacgaatgaatgattcagcaattgaagcgaatgtacaatctttatgtgatggaggcctcttaatgcagttggatggaaatagccatgtaatttacgcggaagaagaagctggtggtacacgacttctgattgatggaaagacatgcttgttacagaatgatcatgatccatcaaagttattagctgagacaccctgcaaacttcttcggttcttggttgctgatggtgctcatgttgatgctgatgtaccatatgcggaagttgaggttatgaaaatgtgcatgcctctcttgtcgcctgcttctggtgtcattcatgttatgatgtctgagggccaggcattgcaggctggtgatcttatagcaaggctggatcttgatgacccttctgctgtgaaaagagctgaaccatttcatggaatatttccacaaatggaccttcctgttgctgcctctagccaagtacacaaaagatatgctgcaagtttgaatgctgctcgaatggtccttgcaggatacgagcataatatcaatgaagttgtacaagatttggtatgctgcctggatgatcccgagcttcccttcctacagtgggatgaacttatgtcagttctagcaactaggcttccaagaaatcttaagagtgagttagaggataaatacatggaatacaagttgaacttttaccatgggaaaaacaaggacttcccgtccaagctgctgagagacatcattgaggcaaatcttgcatatggttcagagaaggaaaaagctacgaatgagaggcttattgagcctcttatgagcctacttaagtcatatgagggtgggagagaaagccatgctcattttgttgtcaagtcccttttcaaggagtaccttgctgtggaagaacttttcagtgatgggattcagtctgatgtgattgaaaccctgcgtcatcagcacagtaaagacttgcagaaggttgtagacattgtgttgtctcaccagggtgtgaggaacaaagctaagcttgtaacagcacttatggaaaagctggtttatccaaatcctgctgcttacagggatctgttggttcgcttttcttcactcaatcataaaagatattataagttggcccttaaagcaagcgaacttcttgaacaaactaaactaagtgaactccgtgcaagcatcgcaagaagcctttctgatctggggatgcataagggagaaatgactattgaagatagcatggaagatttagtctctgccccattacctgtcgaagatgcacttatttctttgtttgattacagtgatccaactgttcagcagaaagtgatcgagacatacatatctcgattgtatcagcctcttcttgtgaaagatagcatccaagtgaaatttaaggaatctggtgcctttgctttatgggaattttctgaagggcatgttgatactaaaaatggacaagggaccgttcttggtcgaacaagatggggtgccatggtagctgtcaaatcagttgaatctgcacgaacagccattgtagctgcattaaaggattcggcacagcatgccagctctgagggcaacatgatgcacattgccttattgagtgctgaaaatgaaaataatatcagtgatgatcaagctcaacataggatggaaaaacttaacaagatactcaaggatactagtgtcgcaaatgatcttcgagctgctggtttgaaggttataagttgcattgttcaaagagatgaagcacgcatgccaatgcgccacacattactctggtcagatgaaaagagttgttatgaggaagagcagattcttcggcatgtggagcctcccctctccatgcttcttgaaatggataagttgaaagtgaaaggatacaatgaaatgaagtatactccatcacgtgatcgtcaatggcatatctacacactaagaaatactgaaaaccccaaaatgttgcatagggtatttttccgaactattgtcaggcaacccaatgcaggcaacaagtttatatcagcccaaattggcgacactgaagtaggaggtcctgaggaatctttgtcatttacatctaatagcattttaagagccttgatgactgctattgaagaattagagcttcatgcaattaggactggtcattctcacatgtatttgtgcatattgaaagaacaaaagcttcttgatctcattccgttttcagggagcacaatcgtcgatgttggccaagacgaagctactgcttgttcacttttaaaatcaatggctttgaagatacacgaacttgttggtgcacagatgcatcatctttctgtatgccagtgggaggtgaaactcaagttgtactgcgatgggcctgccagtggcacctggagagttgtaactacaaatgttactagtcacacttgcaccgttgatatctaccgggaagtggaagatactgaatcgcagaagttagtataccattcagcttctccgtcagctagtcctttgcatggtgtggccctggataatccgtatcaacctttgagtgtcattgatctaaaacgctgctctgctaggaacaacagaactacatattgctatgattttccactggcatttgaaactgccctgcagaagtcatggcagtccaatggctccagtgtttctgaaggcagtgaaaatagtaggtcttatgtgaaagcaacagagctggtgtttgctgaaaaacatgggtcctggggcactcctataatttccatggagcgtcccgctgggctcaatgacattggcatggtagcttggatcttagagatgtccactcctgaatttcccaatggcaggcagattattgtcatagcaaatgatattactttcagagctggatcatttggcccaagggaagatgcgttttttgaagctgtcacgaacctggcctgcgagaggaagcttcctcttatatacttggcagcaaactccggtgctaggattggcatagccgatgaagtgaaatcttgcttccgtgttgggtggtccgatgaaggcagccctgaacggggttttcagtacatttatctgactgacgaagactatgcccgtattagcttgtctgttatagcacacaagctgcagctggataatggtgaaattaggtggattattgactctgttgtgggcaaggaggatgggcttggtgttgagaatatacatggaagtgctgctattgccagtgcttattctagggcatatgaggagacatttacacttacatttgtgactgggcggactgttggaataggagcatatcttgctcggctcggtatacggtgcatacagcgtcttgaccagcctattattttaactgggttttctgccctgaacaagcttcttgggcgggaagtgtacagctcccacatgcagttgggtggtcctaagatcatggcgaccaatggtgttgtccacttgactgtttcagatgaccttgaaggtgtttccaatatattgaggtggctcagctatgttcctgccaacattggtggacctcttcctattacaaaacctttggacccaccagacagacctgttgcatacatccctgagaacacatgtgatccgcgcgcagccattcgtggtgtagatgacagccaagggaaatggttgggtggtatgtttgacaaagacagctttgtcgagacatttgaaggatgggcgaaaacagtggttacgggcagagcaaagcttggaggaattcctgttggtgtcatagctgtggagacacaaaccatgatgcagcttatccctgctgatccaggccagcttgattcccatgagcgatctgttcctcgggctggacaagtgtggttcccagattctgcaaccaagacagctcaggcattgttggacttcaaccgtgaaggattgccgctgttcatccttgctaactggagaggattctctggtggacaaagagatctgtttgaaggaattcttcaggctgggtcaacaattgttgagaaccttaggacatacaatcagcctgcttttgtctacattcctatggctggagagctgcgtggaggagcttgggttgtggttgatagcaaaataaatccagaccgaattgagtgttatgctgagaggactgctaaaggcaatgttctggaacctcaagggttaattgaaatcaaattcagatcagaggagctccaagactgtatgggtaggcttgacccagagttgataaatctgaaagcaaaactccaaggtgcaaagcttggaaatggaagcctaacagatgtagaatcccttcagaagagtatagatgctcgtacgaaacagttgttgcctttatacacccagattgcaatacggtttgctgaattgcatgatacttccctcagaatggcagctaaaggtgtgattaagaaagttgtagattgggaagaattacgttctttcttctacagaaggctacggaggaggatctctgaagatgttcttgcaaaagaaataagaggaatagctggtgaccacttcactcaccaatcagcagttgagctgatcaaggaatggtacttggcttctcaagccacaacaggaagcactgaatgggatgatgatgatgcttttgttgcctggaaggagaatcctgaaaactataagggatatatccaagagttaagggctcaaaaggtgtctcagtcgctctccgatcttgcagactccagttcagatctagaagcattctcacagggtctttccacattattagataagatggatccctctcagagagccaagttcattcaggaagtcaagaaggtcctgggttgatgaataccaacacattcaacacaatgtgtatgctacatgtttttgttcaagtacatacatagaaggatattgatcatatctgatctgaatcgaccatgatttgttaaaagttctgttggacctaattctgtggtcggtatcagcacaaagcttgggggagctgagtgacagacagttagcaagggcacaagtgaatctgtgttctggttttgcaggggtccagtaaggcacaaagttgtttcgctatagttatgtgatgtaaccagcggttcaattctgtaatttttgggtgtatcatgcggatcctagcatactgttgaggtcattaaattttgaacttgaataatatgttttgtaggcatgtgtaccactacctgtaataaacttgttggattagcagtctaaaaaaaaaaaaaaaaaaa

SEQ ID NO: 20 - protein, 2321 aa, Setaria italica
MSQLGLAAAASKALPLLPNRHRTSAGTTFPSPVSSRPSNRRKSRTRSLRDGGDGVSDAKKHNQSVRQGLAGIIDLPNEATSEVDISHGSEDPRGPTDSYQMNGIVNEAHNGRHASVSKVVEFCAALGGKTPIHSILVANNGMAAAKFMRSVRTWANDTFGSEKAIQLIAMATPEDMRINAEHIRIADQFVEVPGGTNNNNYANVQLIVEVAERIGVSAVWPGWGHASENPELPDALTAKGIVFLGPPAASMNALGDKVGSALIAQAAGVPTLSWSGSHVEVPLECCLDAIPEEMYRKACVTTTEEAVASCQVVGYPAMIKASWGGGGKGIRKVHNDDEVRALFKQVQGEVPGSPIFIMRLASQSRHLEVQLLCDQYGNVAALHSRDCSVQRRHQKIIEEGPVTVAPRETVKALEQAARRLAKAVGYVGAATVEYLYSMETGEYYFLELNPRLQVEHPVTEWIAEVNLPAAQVAVGMGIPLWQIPEIRRFYGMDYGGGYDIWRKTAALATPFNFDEVDSQWPKGHCVAVRITSEDPDDGFKPTGGKVKEISFKSKPNVWAYFSVKSGGGIHEFADSQFGHVFAYGLSRSAAITNMALALKEIQIRGEIHSNVDYTVDLLNASDFRENKIHTGWLDTRIAMRVQAERPPWYISVVGGALYKTVTANAATVSDYVSYLTKGQIPPKHISLVSSTVNLNIEGSKYTVETVRTGHGSYRLRMNDSAIEANVQSLCDGGLLMQLDGNSHVIYAEEEAGGTRLLIDGKTCLLQNDHDPSKLLAETPCKLLRFLVADGAHVDADVPYAEVEVMKMCMPLLSPASGVIHVMMSEGQALQAGDLIARLDLDDPSAVKRAEPFHGIFPQMDLPVAASSQVHKRYAASLNAARMVLAGYEHNINEVVQDLVCCLDDPELPFLQWDELMSVLATRLPRNLKSELEDKYMEYKLNFYHGKNKDFPSKLLRDIIEANLAYGSEKEKATNERLIEPLMSLLKSYEGGRESHAHFVVKSLFKEYLAVEELFSDGIQSDVIETLRHQHSKDLQKVVDIVLSHQGVRNKAKLVTALMEKLVYPNPAAYRDLLVRFSSLNHKRYYKLALKASELLEQTKLSELRASIARSLSDLGMHKGEMTIEDSMEDLVSAPLPVEDALISLFDYSDPTVQQKVIETYISRLYQPLLVKDSIQVKFKESGAFALWEFSEGHVDTKNGQGTVLGRTRWGAMVAVKSVESARTAIVAALKDSAQHASSEGNMMHIALLSAENENNISDDQAQHRMEKLNKILKDTSVANDLRAAGLKVISCIVQRDEARMPMRHTLLWSDEKSCYEEEQILRHVEPPLSMLLEMDKLKVKGYNEMKYTPSRDRQWHIYTLRNTENPKMLHRVFFRTIVRQPNAGNKFISAQIGDTEVGGPEESLSFTSNSILRALMTAIEELELHAIRTGHSHMYLCILKEQKLLDLIPFSGSTIVDVGQDEATACSLLKSMALKIHELVGAQMHHLSVCQWEVKLKLYCDGPASGTWRVVTTNVTSHTCTVDIYREVEDTESQKLVYHSASPSASPLHGVALDNPYQPLSVIDLKRCSARNNRTTYCYDFPLAFETALQKSWQSNGSSVSEGSENSRSYVKATELVFAEKHGSWGTPIISMERPAGLNDIGMVAWILEMSTPEFPNGRQIIVIANDITFRAGSFGPREDAFFEAVTNLACERKLPLIYLAANSGARIGIADEVKSCFRVGWSDEGSPERGFQYIYLTDEDYARISLSVIAHKLQLDNGEIRWIIDSVVGKEDGLGVENIHGSAAIASAYSRAYEETFTLTFVTGRTVGIGAYLARLGIRCIQRLDQPIILTGFSALNKLLGREVYSSHMQLGGPKIMATNGVVHLTVSDDLEGVSNILRWLSYVPANIGGPLPITKPLDPPDRPVAYIPENTCDPRAAIRGVDDSQGKWLGGMFDKDSFVETFEGWAKTVVTGRAKLGGIPVGVIAVETQTMMQLIPADPGQLDSHERSVPRAGQVWFPDSATKTAQALLDFNREGLPLFILANWRGFSGGQRDLFEGILQAGSTIVENLRTYNQPAFVYIPMAGELRGGAWVVVDSKINPDRIECYAERTAKGNVLEPQGLIEIKFRSEELQDCMGRLDPELINLKAKLQGAKLGNGSLTDVESLQKSIDARTKQLLPLYTQIAIRFAELHDTSLRMAAKGVIKKVVDWEELRSFFYRRLRRRISEDVLAKEIRGIAGDHFTHQSAVELIKEWYLASQATTGSTEWDDDDAFVAWKENPENYKGYIQELRAQKVSQSLSDLADSSSDLEAFSQGLSTLLDKMDPSQRAKFIQEVKKVLG

SEQ ID NO: 21 - DNA, 6984 bp, Sorghum bicolor
  source 1..6984: mol_type = genomic DNA
atgtcgcagcttggattagctgcagctgcctcaaaggcactgccactactccctaatcgccagcgaagtcctgctgggactacattctcatcatctgcattgtcgaggccctcaaaccgaaggaaaagccgtacccgttcactccgtgatggtggagatggggtatcagatgtcaaaaagcacagccagtctgttcgtcaaggtcttgctggcattattgacctcccaagcgaggcagcttcggaagtggacatttcacatggatctgaggatcctaggggtccaccagattcctatcaaatgaatgggattatcaatgaaacacataatggaagacatgcttcagtgtccaaggttgttgaattttgtgcggcactaggtggcaaaacaccaattcacagtatattagtggccaataatggaatggcagcagcaaagttcatgaggagtgtccggacatgggctaatgatacttttggatctgagaaggcaattcagctcatagctatggcaactccggaagacatgaggataaatgcagagcacattagaattgctgatcaatttgtagaggtgcctggtggaacaaacaataataactacgccaacgttcaactcatagtggaggtagcagaaagagtaggtgtttctgctgtttggcctggttggggtcatgcttctgagaatcctgaactgccggatgcattgactgcaaaaggaatcgttttccttgggccacctgcatcatcaatgaatgcattgggagataaggtcggttcagctctcattgctcaagcagctggggtcccaactcttgcttggagtggatcacatgttgaagtgccattagagtgctgcttagacgctatacctgaggagatgtatagaaaagcttgtgttactaccacagaggaagcagttgcaagttgtcaagtgattggttatcctgccatgattaaggcatcctggggaggtggtggtaaaggaataagaaaggttcataatgatgatgaggttagagcactgtttaagcaagtacaaggtgaagtccctggctccccaatatttatcatgaggcttgcagcccagagtcggcatcttgaagttcagttgctttgtgatcaatatggcaatgtagcagcacttcacagtcgtgattgcagtgtgcaacggcgacaccagaagattattgaagaaggcccagttactgttgctcctcgtgagacagttaaagcacttgagcaggcagcaaggaggcttgctaaggctgtgggttatgttggtgctgctactgttgagtatctttacagcatggaaactggagaatactattttctggagcttaatccccgactacaggtcgagcatccagtcaccgaatggatagctgaagtaaatctgcctgcagctcaagttgctgttggaatgggcatacctctttggcaaattccagaaatcagacgtttctatggaatggactatggaggagggtatgatatttggaggaaaacagcagctcttgctacaccatttaattttgatgaagtagattctcaatggccaaagggccattgtgtagcagttagaattactagtgaggaccctgatgatggtttcaaacctactggtgggaaagtgaaggagataacttttaaagccaagcctaatgtttgggcctacttctcagtaaagtctggtggaggcattcatgaatttgctgattctcagtttggacatgtttttgcatatggactctctagatcagcagcaataacaaacatggctcttgcattaaaagagattcaaattcgtggagaaattcattcaaatgttgattacactgttgacctcttaaacgcttcagacttcagagaaaacaagattcatactggttggctggataccagaatagctatgcgtgttcaagctgagaggcccccatggtatatttcagtggttggaggtgctttatacaaaacagtaaccaccaatgcagccactgtttctgactatgttagttatctcaccaagggccagattccaccaaagcatatatcccttgtcaattctacagttagcttgaatatagaagggagcaaatacacaattgaaactgtaaggactggacatggtagctacaggttgcgaatgaatgaatcgacagttgaagcgaatgtacaatctttatgtgatggtggactcttaatgcagttggatggaaacagccatgtaatttatgcagaagaagaagctggtggtacacggcttcagattgatggaaagacatgcttgttgcagaatgaccatgatccatcaaagttattagctgagacaccctgcaaacttcttcgtttcttggttgctgatggtgctcatgttgatgcggatgtaccatacgctgaagttgaggttatgaagatgtgcatgcctctcctgtcacctgcttctggtgtcgttcattgtatgatgtctgagggccaggcgttgcaggctggtgatcttatagcaaggctggatcttgatgacccttctgctgtgaaaagggctgaaccatttgatggaatatttccacaaatggcgctccctgttgctgcctctagtcaagtacacaaaagatatgctgcaagtttgaatgctgctcgaatggttcttgcaggatatgagcacaatatcaatgaagtcgttcaagatttgatatgctgcctggacaaccctgagcttcctttcctacagtgggatgaacttatgtctgttctagcaacgaggcttccaagaaatctcaagagtgagttagaggataaatacaaggaatacaagttgaatttttaccgtggaaaaaacgtggacttcccttccaagttgctaagagacatcattgaggaaaatcttgcatatggttcagagaaggaaaaggctacaaatgagaggcttgttgagcctcttacgaacctactgaagtcatatgagggtgggagagaaagtcatgcacattttattgccaagtcccttttcgaggagtatcttatggtggaagaacttttcagtgatggaattcagtctgacgttattgaaaccttgcgtcatcagcacagtaaagacctgcagaaggttgtagacattgtgttgtctcaccagggtgtgagaaacaaagctaagcttgtaacagcactcatggaaaagctggtttatccaaatccggttgcttacagggatctgttggttcgcttttcttccctcaatcataaaagatattataagttggcccttaaagcaagtgaacttcttgaacaaaccaaactaagtgaactccgtgcaagcattgcaagaagcctttcagatctggggatgcataagggagacatgactattaaggatagcatggaagatttagtctctgccccattgcctgttgaagatgctcttatttctttgtttgattacagcgatgcaactgttcagcagaaagtgattgagacatacatatcacgattgtaccagcctcatcttgtgaaggatagcatccaaatgaaattcaaggaatatggtgctattgctttttgggaattttctgaagggcatgttgatacttcaaatggacatgggactattcttggtgggaagagatggggttccatggtcgtcctcaaatcacttgaatctgcatcaacagccattgtggctgcattaaaggattcagcacagtacaacagctctgagggcaacacgatgcacattgcattattgagtgctgaaaatgaaagtaatatgagtggaacaagcagtgatgatcaagctcaacataggatggaaaagcttaccaagatactgaaggatactaatgttgcaagtgatctccgagctgctggtttgaaggttataagttgcattgttcaaagagatgaagctcgcatgccaatgcgccacacattcctctggttggatgaaaagagttgttatgaagaagagcaaattctccggcatgtggagcctcccctctctgcacttcttgaattggataagttgaaagtgaaaggatacaatgaaatgaagtatactccgtcacgtgatcgtcaatggcatatctacacactaagaaatactgaaaaccccaaaatgttgcatagggtatttttccgaactattgtcaggcaacccaatgcaggcaacaagtttacatcagctcaggtcagtgatactgaagtaggaggtcctgaagattctctgtcattcacatcgaatagcatcctaagatcattgatgactgctatagaagaattagagcttcatgcgattaggacaggtcattctcacatgtatttgtgcatactgaaagagcaaaagcttcttgatctcattccattttcagggagtacaattgttgatgttggccaagatgaagctactgcttgttcacttttaaaatcaatggctttgaagatacatgaccttgttggtgcaaggatgcatcatctgtctgtatgccagtgggaggtgaaactcaagttggattgtgatgggcctgcaagtggtacctggagagttgtgactacaaatgttactagtcacacctgcaccattgatatctaccgagaagtggaagatacagaatcgcagaagttagtataccattcaaccacttcggcagctggtcctggtccgttgcatggtgttgcactgaataatccatatcaacctttaagtgtgattgatctaaagcgctgctctgctaggaacaacagaacaacatattgctacgattttccgctggcatttgaaactgcactgcagaagtcatggcagtccaacggctctagtgtttctgtaggcagtggaaatagtaaatcctacgtgaaggcaactgagctggtgtttgctgaaaaacatgggtcctggggcactcctatagttcccatggaacgtcctgctgggctcaatgacattggtatggtcgcttggatcttggagatgtcaacacctgaatttcccaatggcaggcagattattgttgtagcaaatgatattactttcagagctggatcattcggcccaagggaagatgcattttttgaagctgtcaccaacctggcttgtgaaaggaaacttccccttatatacttggcagcaaactctggtgctaggattggcatagctgatgaagtaaaatcttgcttccgtgttgggtggtctgacgaaggcagccctgagcgagggtttcagtacatctatctgactgaagaagactatgcccgtattagctcttctgttatagcacataagctgcagctagatagcggtgaaattaggtggattattgactctgttgtgggcaaggaggatgggcttggtgttgagaacatacatggaagtgctgctatcgccagtgcttattctagggcatatgaggagacatttacacttacatttgtgaccggacggactgtaggaataggagcttatcttgctagacttggtatacggtgcatacagcgtcttgaccagccgattattttaacagggttttctgccctgaacaagctccttgggcgggaagtgtacagctcccacatgcagcttggtggtcctaagatcatggcgaccaatggtgttgtccacctgactgttccagatgaccttgaaggtgtttccaatatattgaggtggctcagctatgttcctgcaaacattggtggacctcttcctattaccaaacctttggaccctccagacagacctgttgcatacatccctgagaacacatgcgatccacgtgcagccatccgtggtgtagatgacagccaagggaaatggttgggtggtatgtttgacaaagacagctttgtggagacatttgaaggatgggcaaaaacagtggttactggcagagcaaagcttggaggaattcctgtgggtgtcatagctgtggagacacagaccatgatgcagcttgtccctgctgatccaggtcagcttgattcccatgagcgatccgttcctcgggctggacaagtgtggttcccagattctgcaaccaagacagctcaggcattattagacttcaaccgtgaaggattgcctctgtttatcctggctaactggagaggtttctctggtggacagagagatctctttgaaggaattcttcaggctgggtcaacaattgtcgagaaccttaggacatataatcagcctgcgtttgtctacattcctatggctggagagcttcgtggaggagcttgggttgtggtcgatagcaaaataaatccagaccgcattgagtgttatgctgagaggactgccaaaggtaatgttctcgaacctcaagggttaattgaaatcaagttcaggtcagaggaactccaagactgtatgggtaggcttgaccccgagttgataaatctgaaagcaaaactccaagatgtaaagcatggaaatggaagtctaccagacatagaatcccttcagaagagtatagaagcacgtacgaaacagttgctgcctttatatacccagattgcaatacggtttgctgaattgcatgatacttccctaagaatggcagctaaaggcgtgattaagaaagttgtagactgggaagaatcacgctctttcttctataaaaggctacggagaaggatctctgaagatgttcttgcaaaagaaataagacatatagtcggtgacaacttcactcaccaatcagcaatggagctcatcaaggaatggtacctggcttctccagccacagcaggaagcactggatgggatgacgatgatgcatttgttgcctggaaggacagtcctgaaaactacaatggatatatccaagagctaagggctcaaaaagtgtctcagtcgctctctgatctcactgactccagttcagatctacaagcattctcgcagggtctttctacgctattagataagatggatccctctcaaagagcgaagtttgttcaggaagtcaagaaggtccttggttga

SEQ ID NO: 22 - protein, 2327 aa, Sorghum bicolor
MSQLGLAAAASKALPLLPNRQRSPAGTTFSSSALSRPSNRRKSRTRSLRDGGDGVSDVKKHSQSVRQGLAGIIDLPSEAASEVDISHGSEDPRGPPDSYQMNGIINETHNGRHASVSKVVEFCAALGGKTPIHSILVANNGMAAAKFMRSVRTWANDTFGSEKAIQLIAMATPEDMRINAEHIRIADQFVEVPGGTNNNNYANVQLIVEVAERVGVSAVWPGWGHASENPELPDALTAKGIVFLGPPASSMNALGDKVGSALIAQAAGVPTLAWSGSHVEVPLECCLDAIPEEMYRKACVTTTEEAVASCQVIGYPAMIKASWGGGGKGIRKVHNDDEVRALFKQVQGEVPGSPIFIMRLAAQSRHLEVQLLCDQYGNVAALHSRDCSVQRRHQKIIEEGPVTVAPRETVKALEQAARRLAKAVGYVGAATVEYLYSMETGEYYFLELNPRLQVEHPVTEWIAEVNLPAAQVAVGMGIPLWQIPEIRRFYGMDYGGGYDIWRKTAALATPFNFDEVDSQWPKGHCVAVRITSEDPDDGFKPTGGKVKEITFKAKPNVWAYFSVKSGGGIHEFADSQFGHVFAYGLSRSAAITNMALALKEIQIRGEIHSNVDYTVDLLNASDFRENKIHTGWLDTRIAMRVQAERPPWYISVVGGALYKTVTTNAATVSDYVSYLTKGQIPPKHISLVNSTVSLNIEGSKYTIETVRTGHGSYRLRMNESTVEANVQSLCDGGLLMQLDGNSHVIYAEEEAGGTRLQIDGKTCLLQNDHDPSKLLAETPCKLLRFLVADGAHVDADVPYAEVEVMKMCMPLLSPASGVVHCMMSEGQALQAGDLIARLDLDDPSAVKRAEPFDGIFPQMALPVAASSQVHKRYAASLNAARMVLAGYEHNINEVVQDLICCLDNPELPFLQWDELMSVLATRLPRNLKSELEDKYKEYKLNFYRGKNVDFPSKLLRDIIEENLAYGSEKEKATNERLVEPLTNLLKSYEGGRESHAHFIAKSLFEEYLMVEELFSDGIQSDVIETLRHQHSKDLQKVVDIVLSHQGVRNKAKLVTALMEKLVYPNPVAYRDLLVRFSSLNHKRYYKLALKASELLEQTKLSELRASIARSLSDLGMHKGDMTIKDSMEDLVSAPLPVEDALISLFDYSDATVQQKVIETYISRLYQPHLVKDSIQMKFKEYGAIAFWEFSEGHVDTSNGHGTILGGKRWGSMVVLKSLESASTAIVAALKDSAQYNSSEGNTMHIALLSAENESNMSGTSSDDQAQHRMEKLTKILKDTNVASDLRAAGLKVISCIVQRDEARMPMRHTFLWLDEKSCYEEEQILRHVEPPLSALLELDKLKVKGYNEMKYTPSRDRQWHIYTLRNTENPKMLHRVFFRTIVRQPNAGNKFTSAQVSDTEVGGPEDSLSFTSNSILRSLMTAIEELELHAIRTGHSHMYLCILKEQKLLDLIPFSGSTIVDVGQDEATACSLLKSMALKIHDLVGARMHHLSVCQWEVKLKLDCDGPASGTWRVVTTNVTSHTCTIDIYREVEDTESQKLVYHSTTSAAGPGPLHGVALNNPYQPLSVIDLKRCSARNNRTTYCYDFPLAFETALQKSWQSNGSSVSVGSGNSKSYVKATELVFAEKHGSWGTPIVPMERPAGLNDIGMVAWILEMSTPEFPNGRQIIVVANDITFRAGSFGPREDAFFEAVTNLACERKLPLIYLAANSGARIGIADEVKSCFRVGWSDEGSPERGFQYIYLTEEDYARISSSVIAHKLQLDSGEIRWIIDSVVGKEDGLGVENIHGSAAIASAYSRAYEETFTLTFVTGRTVGIGAYLARLGIRCIQRLDQPIILTGFSALNKLLGREVYSSHMQLGGPKIMATNGVVHLTVPDDLEGVSNILRWLSYVPANIGGPLPITKPLDPPDRPVAYIPENTCDPRAAIRGVDDSQGKWLGGMFDKDSFVETFEGWAKTVVTGRAKLGGIPVGVIAVETQTMMQLVPADPGQLDSHERSVPRAGQVWFPDSATKTAQALLDFNREGLPLFILANWRGFSGGQRDLFEGILQAGSTIVENLRTYNQPAFVYIPMAGELRGGAWVVVDSKINPDRIECYAERTAKGNVLEPQGLIEIKFRSEELQDCMGRLDPELINLKAKLQDVKHGNGSLPDIESLQKSIEARTKQLLPLYTQIAIRFAELHDTSLRMAAKGVIKKVVDWEESRSFFYKRLRRRISEDVLAKEIRHIVGDNFTHQSAMELIKEWYLASPATAGSTGWDDDDAFVAWKDSPENYNGYIQELRAQKVSQSLSDLTDSSSDLQAFSQGLSTLLDKMDPSQRAKFVQEVKKVLG

SEQ ID NO: 23 - protein, 2335 aa, Brachypodium distachyon
MGSTHLPIVGFNASTTPSLSTLRQLNSAGTAFQSSAPSRTSPKKKSRRVQSIREDGDGGVSDPAGHNKSIRQGIAGIIDLPKEGTSAPEVDISHGSEDPRGSYQMNGILNEAHNGRHASLSKVVDFCMALGGKTPIHSVLVANNGMAAAKFMRSIRTWANDTFGSEKAIQLIAMATPEDMRINAEHIRIADQFVEVPGGTNNNNYANVQLIVEIAERTGVSAVWPGWGHASENPELPDALTAKGIVFLGPPASSMNALGDKVGSALIAQAAGVPTLPWSGSQVEIPLELCLDSIPEEMYRKACVTTAEEAVSSCQMIGYPAMIKASWGGGGKGIRKVNNDDEVRALFKQVQGEVPGSPIFIMRLASQSRHLEVQLLCDQYGNVAALHSRDCSVQRRHQKIIEEGPVTVAPRETVKELEQAARRLAKAVGYVGAATVEYLYSMDTGEYYFLELNPRLQVEHPVTEWIAEVNLPAAQVAVGMGIPLWQVPEIRRFYGMDHGGGYDIWRKTAALATPFNFDEVDSQWPKGHCVAVRITSEDPDDGFKPTGGKVKEISFKSKPNVWAYFSVKSGGGIHEFADSQFGHVFAYGVSRSAAITSMALALKEIQIRGEIHSNVDYTVDLLNASDFRENKIHTGWLDTRIAMRVQAERPPWYISVVGGALYKTITTNTATVSDYVSYLIKGQIPPKHISLVNSTVSLNIEESKYAIETIRSGHGSYRLRMNGSVIEANVQTLCDGGLLMQLDGNSHVIYAEEEAGGTRLLIDGKTCLLQNDHDPSRLLAETPCKLLRFLVADGAHVDADVPYAEVEVMKMCMPLLSPAAGVIHVLLSEGQAMQAGDLIARLDLDDPSAVKRAEPFDGFFPEMSLPIAASCQVHKRCAASLNAARMVLAGYEHPINKVVQDLVCCLDTPELPFLQWEELMSVLATRLPRDLKSELEGKYSDYKLTVDHGKNKDFPTKTLRGIIEENLACCSEKEKATNERLVEPLMSLLKSYEGGRENHAHFIVKSLFEEYLSVEELFSDDIQSDVIERLRLQHSKDLQKVVDIVLSHQGVRNKTKLILTLMEKLVYPNPSAYRDQLIRFSSLNHKRYYKLALKASELLEQTKLGELRTSIARSLSELEMFTEERVGLSLQERTLAIDESMGDLVTAPLPVEDALISLFDCTDQTLQQRVIETYISRLYQPHLVKDSVQLKYKESGVIGIWEFAEEHANIRNGQKPTLPEKRWGAMVILKSLESVSTAIGVALKDASHYSSSEGNIMHIALLGDDNQINKSEDSGDNDQAQDRIDKLSVILKQNIVTADLRAAGVKVVSCIVQRDGARMPMRRTFLLSDEKLCFEEEPILRHVEPPLSALLELDKLKVKGYNEMKYTPSRDRQWHIYTLRNTENPKMLHRVFFRTLVRQPTAGNKFTSGRTSDIEAGHAEESLSFTSSSILRSLMTAIEELELHAIRTGHSHMYLCILREQKLLDLVPVSGSTVVDVGQDEATACSLLKEMALKIHELVGARMHHLSVCQWEVKLKLDSDGPASGTWRVVTTNVTSHTCTVDIYREAEDTEAQKLVYHSATSLSAPLHGVALNNPYQPLSVIDLKRCSARNNRTTYCYDFPLAFETAVRKSWYNINTENKQCYVKATELVFADKNGSWGTPLIPMDRPAGLNDIAMVAWILDMSTPEFPNGRQIIVIANDITFRAGSFGPREDAFFESVTNLACERKLPLIYLAANSGARIGIADEVKSCFRVGWSDDGSPERGFQYIYLTEEDYARISSSVIAHKTQLTSGESRWVIDSVVGKEDGLGVENIHGSAAIASAYSRAYKETFTLTFVTGRTVGIGAYLARLGIRCIQRTDQPIILTGFSALNKLLGREVYSSHMQLGGPKIMATNGVVHLTVPDDLEGVSNILRWLSFVPAKIGGPLPITKPLDPPDRPVEYVPENACDPRAAISGIEDSHGKWLGGMFDKDSFVETFEGWAKTVVTGRAKLGGIPVGVIAVETQTMMQLIPADPGQLDSHERSVPRAGQVWFPDSATKTAQALLDFNREGLPLFILANWRGFSGGQRDLFEGILQAGSTIVENLRTYNQPAFVYIPKAAELRGGAWVVVDSKINPDRIECYAERTAKGNVLEPQGLIEIKFRSEELQDCMGRLDPELINLKAKLQAAKHENGTLPDVESLQKSIEARKKQLLPLYTQIAIRFAELHDTSLRMAAKGVIKKVVDWEDSRSFFYKRLQRRISEDVIAKEIRGVTGEQFSHQSALELIKKWYLASQVAEVGNTEWDDDDAFVAWKDNPENYKAYIKELRAQKVSQVLLDLGDSSSDLQALPLGLSMLLDKMDPSRRADFVEEIRKVLG

SEQ ID NO: 24 - protein, 11 aa, synthetic construct
  REGION 1..11: note = Synthetic
LDLNRPPPVEN

SEQ ID NO: 25 - protein, 8 aa, synthetic construct
  REGION 1..8: note = Synthetic
LRLFGVNM

SEQ ID NO: 26 - protein, 8 aa, synthetic construct
  REGION 1..8: note = Synthetic
LKLFGVWL

SEQ ID NO: 27 - protein, 10 aa, synthetic construct
  REGION 1..10: note = Synthetic
LDLELRLGFA

SEQ ID NO: 28 - protein, 203 aa, synthetic construct
  REGION 1..203: note = Synthetic
ERSNSIELRNSFYGRARTSPWSYGDYDNCQQDHDYLLGFSWPPRSYTCSFCKREFRSAQALGGHMNVHRRDRARLRLQQSPSSSSTPSPPYPNPNYSYSTMANSPPPHHSPLTLFPTLSPPSSPRYRAGLIRSLSPKSKHTPENACKTKKSSLLVEAGEATRFTSKDACKILRNDEIISLELEIGLINESEQDLDLELRLGFA

SEQ ID NO: 29 - RNA, 19 nt, synthetic construct
  misc_feature 1..19: note = Synthetic
  source 1..19: mol_type = other RNA
aatggaagataaagaatca

SEQ ID NO: 30 - RNA, 20 nt, synthetic construct
  misc_feature 1..20: note = Synthetic
  source 1..20: mol_type = other RNA
ggatggaagataaagaatca

SEQ ID NO: 31 - RNA, 20 nt, synthetic construct
  misc_feature 1..20: note = Synthetic
  source 1..20: mol_type = other RNA
cagccgccggagtggcggga

SEQ ID NO: 32 - RNA, 20 nt, synthetic construct
  misc_feature 1..20: note = Synthetic
  source 1..20: mol_type = other RNA
gagccgccggagtggcggga

SEQ ID NO: 33 - RNA, 20 nt, synthetic construct
  misc_feature 1..20: note = Synthetic
  source 1..20: mol_type = other RNA
aatgatattacgttcagagc

SEQ ID NO: 34 - RNA, 20 nt, synthetic construct
  misc_feature 1..20: note = Synthetic
  source 1..20: mol_type = other RNA
gatgatattacgttcagagc

SEQ ID NO: 35 - RNA, 20 nt, synthetic construct
  misc_feature 1..20: note = Synthetic
  source 1..20: mol_type = other RNA
acgttcagagctggatcatt

SEQ ID NO: 36 - RNA, 20 nt, synthetic construct
  misc_feature 1..20: note = Synthetic
  source 1..20: mol_type = other RNA
gcgttcagagctggatcatt

SEQ ID NO: 37 - RNA, 20 nt, synthetic construct
  misc_feature 1..20: note = Synthetic
  source 1..20: mol_type = other RNA
tcaaaaaatgcatcttccct

SEQ ID NO: 38 - RNA, 20 nt, synthetic construct
  misc_feature 1..20: note = Synthetic
  source 1..20: mol_type = other RNA
gcaaaaaatgcatcttccct

SEQ ID NO: 39 - RNA, 20 nt, synthetic construct
  misc_feature 1..20: note = Synthetic
  source 1..20: mol_type = other RNA
gagctggatcatttggccca

SEQ ID NO: 40 - RNA, 20 nt, synthetic construct
  misc_feature 1..20: note = Synthetic
  source 1..20: mol_type = other RNA
cttggtgtggagaatataca

SEQ ID NO: 41 - RNA, 20 nt, synthetic construct
  misc_feature 1..20: note = Synthetic
  source 1..20: mol_type = other RNA
gttggtgtggagaatataca

SEQ ID NO: 42 - RNA, 20 nt, synthetic construct
  misc_feature 1..20: note = Synthetic
  source 1..20: mol_type = other RNA
atatgccctagaataagcac

SEQ ID NO: 43 - RNA, 20 nt, synthetic construct
  misc_feature 1..20: note = Synthetic
  source 1..20: mol_type = other RNA
gtatgccctagaataagcac

SEQ ID NO: 44 - RNA, 20 nt, synthetic construct
  misc_feature 1..20: note = Synthetic
  source 1..20: mol_type = other RNA
ggagcttatcttgctcgact

SEQ ID NO: 45 - RNA, 20 nt, synthetic construct
  misc_feature 1..20: note = Synthetic
  source 1..20: mol_type = other RNA
ggtcaagacgctgtatgcac

SEQ ID NO: 46 - RNA, 20 nt, synthetic construct
  misc_feature 1..20: note = Synthetic
  source 1..20: mol_type = other RNA
atcttgctcgacttggcatc

SEQ ID NO: 47 - RNA, 20 nt, synthetic construct
  misc_feature 1..20: note = Synthetic
  source 1..20: mol_type = other RNA
gtcttgctcgacttggcatc

SEQ ID NO: 48 - RNA, 20 nt, synthetic construct
  misc_feature 1..20: note = Synthetic
  source 1..20: mol_type = other RNA
tccagtgggtgtgatagctg

SEQ ID NO: 49 - RNA, 20 nt, synthetic construct
  misc_feature 1..20: note = Synthetic
  source 1..20: mol_type = other RNA
gccagtgggtgtgatagctg

SEQ ID NO: 50 - RNA, 20 nt, synthetic construct
  misc_feature 1..20: note = Synthetic
  source 1..20: mol_type = other RNA
agcagggatagtttgcatca

SEQ ID NO: 51 - RNA, 20 nt, synthetic construct
  misc_feature 1..20: note = Synthetic
  source 1..20: mol_type = other RNA
ggcagggatagtttgcatca

SEQ ID NO: 52 - RNA, 20 nt, synthetic construct
  misc_feature 1..20: note = Synthetic
  source 1..20: mol_type = other RNA
gttggtgtggtgaatataca

SEQ ID NO: 53 - RNA, 20 nt, synthetic construct
  misc_feature 1..20: note = Synthetic
  source 1..20: mol_type = other RNA
cttggtgtggagaatataca

SEQ ID NO: 54 - RNA, 20 nt, synthetic construct
  misc_feature 1..20: note = Synthetic
  source 1..20: mol_type = other RNA
gtgggcaaggaagatggact

SEQ ID NO: 55 - RNA, 20 nt, synthetic construct
  misc_feature 1..20: note = Synthetic
  source 1..20: mol_type = other RNA
atatgcccaagaataagcac

SEQ ID NO: 56 - RNA, 20 nt, synthetic construct
  misc_feature 1..20: note = Synthetic
  source 1..20: mol_type = other RNA
gtatggcctagaataagcac

SEQ ID NO: 57 - RNA, 20 nt, synthetic construct
  misc_feature 1..20: note = Synthetic
  source 1..20: mol_type = other RNA
gactgcaaaaggcaatgttc

SEQ ID NO: 58 - RNA, 20 nt, synthetic construct
  misc_feature 1..20: note = Synthetic
  source 1..20: mol_type = other RNA
gatgctgagaggactgcaaa

SEQ ID NO: 59 - RNA, 20 nt, synthetic construct
  misc_feature 1..20: note = Synthetic
  source 1..20: mol_type = other RNA
tatgctgagaggactgcaaa

SEQ ID NO: 60 - RNA, 20 nt, synthetic construct
  misc_feature 1..20: note = Synthetic
  source 1..20: mol_type = other RNA
ggcaatgttctggaaccgca

SEQ ID NO: 61 - RNA, 20 nt, synthetic construct
  misc_feature 1..20: note = Synthetic
  source 1..20: mol_type = other RNA
ttgatctcaattaacccttg

SEQ ID NO: 62 - RNA, 20 nt, synthetic construct
  misc_feature 1..20: note = Synthetic
  source 1..20: mol_type = other RNA
gtgatctcaattaacccttg

SEQ ID NO: 63 - RNA, 20 nt, synthetic construct
  misc_feature 1..20: note = Synthetic
  source 1..20: mol_type = other RNA
gcgaggaggggcttgggttg

SEQ ID NO: 64 - RNA, 19 nt, synthetic construct
  misc_feature 1..19: note = Synthetic
  source 1..19: mol_type = other RNA
agaggaggggcttgggttg

SEQ ID NO: 65 - RNA, 20 nt, synthetic construct
  misc_feature 1..20: note = Synthetic
  source 1..20: mol_type = other RNA
ggctgcagagctacgaggag

SEQ ID NO: 66 - RNA, 20 nt, synthetic construct
  misc_feature 1..20: note = Synthetic
  source 1..20: mol_type = other RNA
cgtatcgtgagttacgccag

SEQ ID NO: 67 - RNA, 20 nt, synthetic construct
  misc_feature 1..20: note = Synthetic
  source 1..20: mol_type = other RNA
tcctcgtagctctgcagcca

SEQ ID NO: 68 - RNA, 20 nt, synthetic construct
  misc_feature 1..20: note = Synthetic
  source 1..20: mol_type = other RNA
gcctcgtagctctgcagcca

SEQ ID NO: 69 - RNA, 20 nt, synthetic construct
  misc_feature 1..20: note = Synthetic
  source 1..20: mol_type = other RNA
caagggttaattgagatcaa

SEQ ID NO: 70 - RNA, 20 nt, synthetic construct
  misc_feature 1..20: note = Synthetic
  source 1..20: mol_type = other RNA
gaagggttaattgagatcaa

SEQ ID NO: 71 - DNA, 202 bp, synthetic construct
  misc_feature 1..202: note = Synthetic
  modified_base 1: mod_base = OTHER; note = CY3 (Cyanine 3)
  modified_base 202: mod_base = OTHER; note = 3'DMT dC CPG (5'-Dimethoxytrityl-N-benzoyl-3'-deoxyCytosine, 2'-succinoyl-long chain alkylamino-CPG 500)
  source 1..202: mol_type = other DNA
gtcatagcacataagatgcagctagacagtggtgaaattaggtgggttattgattctgttgtgggcaaggaagatggacttggtgtggagaatatacatggaagtgctgctattgccagtgcttattctagggcatataaggagacatttacacttacatttgtgactggaagaactgttggaataggagcttatcttgctc

SEQ ID NO: 72 - DNA, 202 bp, synthetic construct
  misc_feature 1..202: note = Synthetic
  modified_base 1: mod_base = OTHER; note = CY3 (Cyanine 3)
  modified_base 202: mod_base = OTHER; note = 3'DMT dC CPG (5'-Dimethoxytrityl-N-benzoyl-3'-deoxyCytosine, 2'-succinoyl-long chain alkylamino-CPG 500)
  source 1..202: mol_type = other DNA
gtcatagcacataagatgcagctagacagtggtgaaattaggtgggttattgattctgttgtgggcaaggaagatggacttggtgtggagaatcttcatggaagtgctgctattgccagtgcttattctagggcatataaggagacatttacacttacatttgtgactggaagaactgttggaataggagcttatcttgctc

SEQ ID NO: 73 - DNA, 202 bp, synthetic construct
  misc_feature 1..202: note = Synthetic
  modified_base 1: mod_base = OTHER; note = CY3 (Cyanine 3)
  modified_base 202: mod_base = OTHER; note = 3'DMT dC CPG (5'-Dimethoxytrityl-N-benzoyl-3'-deoxyCytosine, 2'-succinoyl-long chain alkylamino-CPG 500)
  source 1..202: mol_type = other DNA
gtcatagcacataagatgcagctagacagtggtgaaattaggtgggttattgattctgttgtgggcaaggaagatggacttggtgtggagaatctccatggaagtgctgctattgccagtgcttattctagggcatataaggagacatttacacttacatttgtgactggaagaactgttggaataggagcttatcttgctc

SEQ ID NO: 74 - DNA, 202 bp, synthetic construct
  misc_feature 1..202: note = Synthetic
  modified_base 1: mod_base = OTHER; note = CY3 (Cyanine 3)
  modified_base 202: mod_base = OTHER; note = 3'DMT dC CPG (5'-Dimethoxytrityl-N-benzoyl-3'-deoxyCytosine, 2'-succinoyl-long chain alkylamino-CPG 500)
  source 1..202: mol_type = other DNA
gtcatagcacataagatgcagctagacagtggtgaaattaggtgggttattgattctgttgtgggcaaggaagatggacttggtgtggagaatctacatggaagtgctgctattgccagtgcttattctagggcatataaggagacatttacacttacatttgtgactggaagaactgttggaataggagcttatcttgctc

SEQ ID NO: 75 - DNA, 202 bp, synthetic construct
  misc_feature 1..202: note = Synthetic
  modified_base 1: mod_base = OTHER; note = CY3 (Cyanine 3)
  modified_base 202: mod_base = OTHER; note = 3'DMT dC CPG (5'-Dimethoxytrityl-N-benzoyl-3'-deoxyCytosine, 2'-succinoyl-long chain alkylamino-CPG 500)
  source 1..202: mol_type = other DNA
gtcatagcacataagatgcagctagacagtggtgaaattaggtgggttattgattctgttgtgggcaaggaagatggacttggtgtggagaatctgcatggaagtgctgctattgccagtgcttattctagggcatataaggagacatttacacttacatttgtgactggaagaactgttggaataggagcttatcttgctc

SEQ ID NO: 76 - DNA, 202 bp, synthetic construct
  misc_feature 1..202: note = Synthetic
  modified_base 1: mod_base = OTHER; note = CY3 (Cyanine 3)
  modified_base 202: mod_base = OTHER; note = 3'DMT dC CPG (5'-Dimethoxytrityl-N-benzoyl-3'-deoxyCytosine, 2'-succinoyl-long chain alkylamino-CPG 500)
  modified_base 96: mod_base = OTHER; note = uracil
  source 1..202: mol_type = other DNA
gtcatagcacataagatgcagctagacagtggtgaaattaggtgggttattgattctgttgtgggcaaggaagatggacttggtgtggagaatactcatggaagtgctgctattgccagtgcttattctagggcatataaggagacatttacacttacatttgtgactggaagaactgttggaataggagcttatcttgctc

SEQ ID NO: 77 - DNA, 202 bp, synthetic construct
  misc_feature 1..202: note = Synthetic
  modified_base 1: mod_base = OTHER; note = CY3 (Cyanine 3)
  modified_base 202: mod_base = OTHER; note = 3'DMT dC CPG (5'-Dimethoxytrityl-N-benzoyl-3'-deoxyCytosine, 2'-succinoyl-long chain alkylamino-CPG 500)
  source 1..202: mol_type = other DNA
gtcatagcacataagatgcagctagacagtggtgaaattaggtgggttattgattctgttgtgggcaaggaagatggacttggtgtggagaatacccatggaagtgctgctattgccagtgcttattctagggcatataaggagacatttacacttacatttgtgactggaagaactgttggaataggagcttatcttgctc

SEQ ID NO: 78 - DNA, 202 bp, synthetic construct
  misc_feature 1..202: note = Synthetic
  modified_base 1: mod_base = OTHER; note = CY3 (Cyanine 3)
  modified_base 202: mod_base = OTHER; note = 3'DMT dC CPG (5'-Dimethoxytrityl-N-benzoyl-3'-deoxyCytosine, 2'-succinoyl-long chain alkylamino-CPG 500)
  source 1..202: mol_type = other DNA
gtcatagcacataagatgcagctagacagtggtgaaattaggtgggttattgattctgttgtgggcaaggaagatggacttggtgtggagaatacacatggaagtgctgctattgccagtgcttattctagggcatataaggagacatttacacttacatttgtgactggaagaactgttggaataggagcttatcttgctc

SEQ ID NO: 79 - DNA, 202 bp, synthetic construct
  misc_feature 1..202: note = Synthetic
  modified_base 1: mod_base = OTHER; note = CY3 (Cyanine 3)
  modified_base 202: mod_base = OTHER; note = 3'DMT dC CPG (5'-Dimethoxytrityl-N-benzoyl-3'-deoxyCytosine, 2'-succinoyl-long chain alkylamino-CPG 500)
  source 1..202: mol_type = other DNA
gtcatagcacataagatgcagctagacagtggtgaaattaggtgggttattgattctgttgtgggcaaggaagatggacttggtgtggagaatacgcatggaagtgctgctattgccagtgcttattctagggcatataaggagacatttacacttacatttgtgactggaagaactgttggaataggagcttatcttgctc

SEQ ID NO: 80 - DNA, 202 bp, synthetic construct
  misc_feature 1..202: note = Synthetic
  modified_base 1: mod_base = OTHER; note = CY3 (Cyanine 3)
  modified_base 202: mod_base = OTHER; note = 3'DMT dC CPG (5'-Dimethoxytrityl-N-benzoyl-3'-deoxyCytosine, 2'-succinoyl-long chain alkylamino-CPG 500)
  source 1..202: mol_type = other DNA
gtcatagcacataagatgcagctagacagtggtgaaattaggtgggttattgattctgttgtgggcaaggaagatggacttggtgtggagaatcttcatggaagtggagctattgccagtgcttattctagggcatataaggagacatttacacttacatttgtgactggaagaactgttggaataggagcttatcttgctc

SEQ ID NO: 81 - DNA, 202 bp, synthetic construct
  misc_feature 1..202: note = Synthetic
  modified_base 1: mod_base = OTHER; note = CY3 (Cyanine 3)
  modified_base 202: mod_base = OTHER; note = 3'DMT dC CPG (5'-Dimethoxytrityl-N-benzoyl-3'-deoxyCytosine, 2'-succinoyl-long chain alkylamino-CPG 500)
  source 1..202: mol_type = other DNA
gtcatagcacataagatgcagctagacagtggtgaaattaggtgggttattgattctgttgtgggcaaggaagatggacttggtgtggagaatctccatggaagtggggctattgccagtgcttattctagggcatataaggagacatttacacttacatttgtgactggaagaactgttggaataggagcttatcttgctc

SEQ ID NO: 82 - DNA, 202 bp, synthetic construct
  misc_feature 1..202: note = Synthetic
  modified_base 1: mod_base = OTHER; note = CY3 (Cyanine 3)
  modified_base 202: mod_base = OTHER; note = 3'DMT dC CPG (5'-Dimethoxytrityl-N-benzoyl-3'-deoxyCytosine, 2'-succinoyl-long chain alkylamino-CPG 500)
  source 1..202: mol_type = other DNA
gtcatagcacataagatgcagctagacagtggtgaaattaggtgggttattgattctgttgtgggcaaggaagatggacttggtgtggagaatctacatggaagtggtgctattgccagtgcttattctagggcatataaggagacatttacacttacatttgtgactggaagaactgttggaataggagcttatcttgctc

SEQ ID NO: 83 - DNA, 202 bp, synthetic construct
  misc_feature 1..202: note = Synthetic
  modified_base 1: mod_base = OTHER; note = CY3 (Cyanine 3)
  modified_base 202: mod_base = OTHER; note = 3'DMT dC CPG (5'-Dimethoxytrityl-N-benzoyl-3'-deoxyCytosine, 2'-succinoyl-long chain alkylamino-CPG 500)
  source 1..202: mol_type = other DNA
gtcatagcacataagatgcagctagacagtggtgaaattaggtgggttattgattctgttgtgggcaaggaagatggacttggtgtggagaatctgcatggaagtaacgctattgccagtgcttattctagggcatataaggagacatttacacttacatttgtgactggaagaactgttggaataggagcttatcttgctc

SEQ ID NO: 84 - DNA, 114 bp, synthetic construct
  misc_feature 1..114: note = Synthetic
  modified_base 1: mod_base = OTHER; note = CY3 (Cyanine 3)
  modified_base 114: mod_base = OTHER; note = 3'DMT dC CPG (5'-Dimethoxytrityl-N-benzoyl-3'-deoxyCytosine, 2'-succinoyl-long chain alkylamino-CPG 500)
  source 1..114: mol_type = other DNA
gggttattgattctgttgtgggcaaggaagatggacttggtgtggagaatatacatggaagtgctgctattgccagtgcttattctagggcatataaggagacatttacactta

SEQ ID NO: 85 - DNA, 114 bp, synthetic construct
  misc_feature 1..114: note = Synthetic
  modified_base 1: mod_base = OTHER; note = CY3 (Cyanine 3)
  modified_base 114: mod_base = OTHER; note = 3'DMT dC CPG (5'-Dimethoxytrityl-N-benzoyl-3'-deoxyCytosine, 2'-succinoyl-long chain alkylamino-CPG 500)
  source 1..114: mol_type = other DNA
gggttattgattctgttgtgggcaaggaagatggacttggtgtggagaatcttcatggaagtgctgctattgccagtgcttattctagggcatataaggagacatttacactta

SEQ ID NO: 86 - DNA, 114 bp, synthetic construct
  misc_feature 1..114: note = Synthetic
  modified_base 1: mod_base = OTHER; note = CY3 (Cyanine 3)
  modified_base 114: mod_base = OTHER; note = 3'DMT dC CPG (5'-Dimethoxytrityl-N-benzoyl-3'-deoxyCytosine, 2'-succinoyl-long chain alkylamino-CPG 500)
  source 1..114: mol_type = other DNA
gggttattgattctgttgtgggcaaggaagatggacttggtgtggagaatctccatggaagtgctgctattgccagtgcttattctagggcatataaggagacatttacactta

SEQ ID NO: 87 - DNA, 114 bp, synthetic construct
  misc_feature 1..114: note = Synthetic
  modified_base 1: mod_base = OTHER; note = CY3 (Cyanine 3)
  modified_base 114: mod_base = OTHER; note = 3'DMT dC CPG (5'-Dimethoxytrityl-N-benzoyl-3'-deoxyCytosine, 2'-succinoyl-long chain alkylamino-CPG 500)
  source 1..114: mol_type = other DNA
gggttattgattctgttgtgggcaaggaagatggacttggtgtggagaatctacatggaagtgctgctattgccagtgcttattctagggcatataaggagacatttacactta

SEQ ID NO: 88 - DNA, 114 bp, synthetic construct
  misc_feature 1..114: note = Synthetic
  modified_base 1: mod_base = OTHER; note = CY3 (Cyanine 3)
  modified_base 114: mod_base = OTHER; note = 3'DMT dC CPG (5'-Dimethoxytrityl-N-benzoyl-3'-deoxyCytosine, 2'-succinoyl-long chain alkylamino-CPG 500)
  source 1..114: mol_type = other DNA
gggttattgattctgttgtgggcaaggaagatggacttggtgtggagaatctgcatggaagtgctgctattgccagtgcttattctagggcatataaggagacatttacactta

SEQ ID NO: 89 - DNA, 114 bp, synthetic construct
  misc_feature 1..114: note = Synthetic
  modified_base 1: mod_base = OTHER; note = CY3 (Cyanine 3)
  modified_base 114: mod_base = OTHER; note = 3'DMT dC CPG (5'-Dimethoxytrityl-N-benzoyl-3'-deoxyCytosine, 2'-succinoyl-long chain alkylamino-CPG 500)
  modified_base 53: mod_base = OTHER; note = uracil
  source 1..114: mol_type = other DNA
gggttattgattctgttgtgggcaaggaagatggacttggtgtggagaatactcatggaagtgctgctattgccagtgcttattctagggcatataaggagacatttacactta

SEQ ID NO: 90 - DNA, 114 bp, synthetic construct
  misc_feature 1..114: note = Synthetic
  modified_base 1: mod_base = OTHER; note = CY3 (Cyanine 3)
  modified_base 114: mod_base = OTHER; note = 3'DMT dC CPG (5'-Dimethoxytrityl-N-benzoyl-3'-deoxyCytosine, 2'-succinoyl-long chain alkylamino-CPG 500)
  source 1..114: mol_type = other DNA
gggttattgattctgttgtgggcaaggaagatggacttggtgtggagaatacccatggaagtgctgctattgccagtgcttattctagggcatataaggagacatttacactta

SEQ ID NO: 91 - DNA, 114 bp, synthetic construct
  misc_feature 1..114: note = Synthetic
  modified_base 1: mod_base = OTHER; note = CY3 (Cyanine 3)
  modified_base 114: mod_base = OTHER; note = 3'DMT dC CPG (5'-Dimethoxytrityl-N-benzoyl-3'-deoxyCytosine, 2'-succinoyl-long chain alkylamino-CPG 500)
  source 1..114: mol_type = other DNA
gggttattgattctgttgtgggcaaggaagatggacttggtgtggagaatacacatggaagtgctgctattgccagtgcttattctagggcatataaggagacatttacactta

SEQ ID NO: 92 - DNA, 114 bp, synthetic construct
  misc_feature 1..114: note = Synthetic
  modified_base 1: mod_base = OTHER; note = CY3 (Cyanine 3)
  modified_base 114: mod_base = OTHER; note = 3'DMT dC CPG (5'-Dimethoxytrityl-N-benzoyl-3'-deoxyCytosine, 2'-succinoyl-long chain alkylamino-CPG 500)
  source 1..114: mol_type = other DNA
gggttattgattctgttgtgggcaaggaagatggacttggtgtggagaatacgcatggaagtgctgctattgccagtgcttattctagggcatataaggagacatttacactta

SEQ ID NO: 93 - DNA, 114 bp, synthetic construct
  misc_feature 1..114: note = Synthetic
  modified_base 1: mod_base = OTHER; note = CY3 (Cyanine 3)
  modified_base 114: mod_base = OTHER; note = 3'DMT dC CPG (5'-Dimethoxytrityl-N-benzoyl-3'-deoxyCytosine, 2'-succinoyl-long chain alkylamino-CPG 500)
  source 1..114: mol_type = other DNA
gggttattgattctgttgtgggcaaggaagatggacttggtgtggagaatcttcatggaagtggagctattgccagtgcttattctagggcatataaggagacatttacactta

SEQ ID NO: 94 - DNA, 114 bp, synthetic construct
  misc_feature 1..114: note = Synthetic
  modified_base 1: mod_base = OTHER; note = CY3 (Cyanine 3)
  modified_base 114: mod_base = OTHER; note = 3'DMT dC CPG (5'-Dimethoxytrityl-N-benzoyl-3'-deoxyCytosine, 2'-succinoyl-long chain alkylamino-CPG 500)
  source 1..114: mol_type = other DNA
gggttattgattctgttgtgggcaaggaagatggacttggtgtggagaatctccatggaagtggggctattgccagtgcttattctagggcatataaggagacatttacactta

SEQ ID NO: 95 - DNA, 114 bp, synthetic construct
  misc_feature 1..114: note = Synthetic
  modified_base 1: mod_base = OTHER; note = CY3 (Cyanine 3)
  modified_base 114: mod_base = OTHER; note = 3'DMT dC CPG (5'-Dimethoxytrityl-N-benzoyl-3'-deoxyCytosine, 2'-succinoyl-long chain alkylamino-CPG 500)
  source 1..114: mol_type = other DNA
gggttattgattctgttgtgggcaaggaagatggacttggtgtggagaatctacatggaagtggtgctattgccagtgcttattctagggcatataaggagacatttacactta

SEQ ID NO: 96 - DNA, 114 bp, synthetic construct
  misc_feature 1..114: note = Synthetic
  modified_base 1: mod_base = OTHER; note = CY3 (Cyanine 3)
  modified_base 114: mod_base = OTHER; note = 3'DMT dC CPG (5'-Dimethoxytrityl-N-benzoyl-3'-deoxyCytosine, 2'-succinoyl-long chain alkylamino-CPG 500)
  source 1..114: mol_type = other DNA
gggttattgattctgttgtgggcaaggaagatggacttggtgtggagaatctgcatggaagtaacgctattgccagtgcttattctagggcatataaggagacatttacactta

SEQ ID NO: 97 - DNA, 202 bp, synthetic construct
  misc_feature 1..202: note = Synthetic
  modified_base 1: mod_base = OTHER; note = CY3 (Cyanine 3)
  modified_base 202: mod_base = OTHER; note = 3'DMT dC CPG (5'-Dimethoxytrityl-N-benzoyl-3'-deoxyCytosine, 2'-succinoyl-long chain alkylamino-CPG 500)
  source 1..202: mol_type = other DNA
gagcaagataagctcctattccaacagttcttccagtcacaaatgtaagtgtaaatgtctccttatatgccctagaataagcactggcaatagcagcacttccatgtatattctccacaccaagtccatcttccttgcccacaacagaatcaataacccacctaatttcaccactgtctagctgcatcttatgtgctatgac

SEQ ID NO: 98 - DNA, 202 bp, synthetic construct
  misc_feature 1..202: note = Synthetic
  modified_base 1: mod_base = OTHER; note = CY3 (Cyanine 3)
  modified_base 202: mod_base = OTHER; note = 3'DMT dC CPG (5'-Dimethoxytrityl-N-benzoyl-3'-deoxyCytosine, 2'-succinoyl-long chain alkylamino-CPG 500)
  source 1..202: mol_type = other DNA
gagcaagataagctcctattccaacagttcttccagtcacaaatgtaagtgtaaatgtctccttatatgccctagaataagcactggcaatagcagcacttccatgaagattctccacaccaagtccatcttccttgcccacaacagaatcaataacccacctaatttcaccactgtctagctgcatcttatgtgctatgac

SEQ ID NO: 99 - DNA, 202 bp, synthetic construct
  misc_feature 1..202: note = Synthetic
  modified_base 1: mod_base = OTHER; note = CY3 (Cyanine 3)
  modified_base 202: mod_base = OTHER; note = 3'DMT dC CPG (5'-Dimethoxytrityl-N-benzoyl-3'-deoxyCytosine, 2'-succinoyl-long chain alkylamino-CPG 500)
  source 1..202: mol_type = other DNA
gagcaagataagctcctattccaacagttcttccagtcacaaatgtaagtgtaaatgtctccttatatgccctagaataagcactggcaatagcagcacttccatggagattctccacaccaagtccatcttccttgcccacaacagaatcaataacccacctaatttcaccactgtctagctgcatcttatgtgctatgac

SEQ ID NO: 100 - DNA, 202 bp, synthetic construct
  misc_feature 1..202: note = Synthetic
  modified_base 1: mod_base = OTHER; note = CY3 (Cyanine 3)
  modified_base 202: mod_base = OTHER; note = 3'DMT dC CPG (5'-Dimethoxytrityl-N-benzoyl-3'-deoxyCytosine, 2'-succinoyl-long chain alkylamino-CPG 500)
  source 1..202: mol_type = other DNA
gagcaagataagctcctattccaacagttcttccagtcacaaatgtaagtgtaaatgtctccttatatgccctagaataagcactggcaatagcagcacttccatgtagattctccacaccaagtccatcttccttgcccacaacagaatcaataacccacctaatttcaccactgtctagctgcatcttatgtgctatgac

SEQ ID NO: 101 - DNA, 202 bp, synthetic construct
  misc_feature 1..202: note = Synthetic
  modified_base 1: mod_base = OTHER; note = CY3 (Cyanine 3)
  modified_base 202: mod_base = OTHER; note = 3'DMT dC CPG (5'-Dimethoxytrityl-N-benzoyl-3'-deoxyCytosine, 2'-succinoyl-long chain alkylamino-CPG 500)
  source 1..202: mol_type = other DNA
gagcaagataagctcctattccaacagttcttccagtcacaaatgtaagtgtaaatgtctccttatatgccctagaataagcactggcaatagcagcacttccatgcagattctccacaccaagtccatcttccttgcccacaacagaatcaataacccacctaatttcaccactgtctagctgcatcttatgtgctatgac

SEQ ID NO: 102 - DNA, 202 bp, synthetic construct
  misc_feature 1..202: note = Synthetic
  modified_base 1: mod_base = OTHER; note = CY3 (Cyanine 3)
  modified_base 202: mod_base = OTHER; note = 3'DMT dC CPG (5'-Dimethoxytrityl-N-benzoyl-3'-deoxyCytosine, 2'-succinoyl-long chain alkylamino-CPG 500)
  source 1..202: mol_type = other DNA
gagcaagataagctcctattccaacagttcttccagtcacaaatgtaagtgtaaatgtctccttatatgccctagaataagcactggcaatagcagcacttccatgagtattctccacaccaagtccatcttccttgcccacaacagaatcaataacccacctaatttcaccactgtctagctgcatcttatgtgctatgac

SEQ ID NO: 103 - DNA, 202 bp, synthetic construct
  misc_feature 1..202: note = Synthetic
  modified_base 1: mod_base = OTHER; note = CY3 (Cyanine 3)
  modified_base 202: mod_base = OTHER; note = 3'DMT dC CPG (5'-Dimethoxytrityl-N-benzoyl-3'-deoxyCytosine, 2'-succinoyl-long chain alkylamino-CPG 500)
  source 1..202: mol_type = other DNA
gagcaagataagctcctattccaacagttcttccagtcacaaatgtaagtgtaaatgtctccttatatgccctagaataagcactggcaatagcagcacttccatgggtattctccacaccaagtccatcttccttgcccacaacagaatcaataacccacctaatttcaccactgtctagctgcatcttatgtgctatgac

SEQ ID NO: 104 - DNA, 202 bp, synthetic construct
  misc_feature 1..202: note = Synthetic
  modified_base 1: mod_base = OTHER; note = CY3 (Cyanine 3)
  modified_base 202: mod_base = OTHER; note = 3'DMT dC CPG (5'-Dimethoxytrityl-N-benzoyl-3'-deoxyCytosine, 2'-succinoyl-long chain alkylamino-CPG 500)
  source 1..202: mol_type = other DNA
gagcaagataagctcctattccaacagttcttccagtcacaaatgtaagtgtaaatgtctccttatatgccctagaataagcactggcaatagcagcacttccatgtgtattctccacaccaagtccatcttccttgcccacaacagaatcaataacccacctaatttcaccactgtctagctgcatcttatgtgctatgac

SEQ ID NO: 105 - DNA, 202 bp, synthetic construct
  misc_feature 1..202: note = Synthetic
  modified_base 1: mod_base = OTHER; note = CY3 (Cyanine 3)
  modified_base 202: mod_base = OTHER; note = 3'DMT dC CPG (5'-Dimethoxytrityl-N-benzoyl-3'-deoxyCytosine, 2'-succinoyl-long chain alkylamino-CPG 500)
  source 1..202: mol_type = other DNA
gagcaagataagctcctattccaacagttcttccagtcacaaatgtaagtgtaaatgtctccttatatgccctagaataagcactggcaatagcagcacttccatgcgtattctccacaccaagtccatcttccttgcccacaacagaatcaataacccacctaatttcaccactgtctagctgcatcttatgtgctatgac

SEQ ID NO: 106 - DNA, 202 bp, synthetic construct
  misc_feature 1..202: note = Synthetic
  modified_base 1: mod_base = OTHER; note = CY3 (Cyanine 3)
  modified_base 202: mod_base = OTHER; note = 3'DMT dC CPG (5'-Dimethoxytrityl-N-benzoyl-3'-deoxyCytosine, 2'-succinoyl-long chain alkylamino-CPG 500)
  source 1..202: mol_type = other DNA
gagcaagataagctcctattccaacagttcttccagtcacaaatgtaagtgtaaatgtctccttatatgccctagaataagcactggcaatagctccacttccatgaagattctccacaccaagtccatcttccttgcccacaacagaatcaataacccacctaatttcaccactgtctagctgcatcttatgtgctatgac

SEQ ID NO: 107 - DNA, 202 bp, synthetic construct
  misc_feature 1..202: note = Synthetic
  modified_base 1: mod_base = OTHER; note = CY3 (Cyanine 3)
  modified_base 202: mod_base = OTHER; note = 3'DMT dC CPG (5'-Dimethoxytrityl-N-benzoyl-3'-deoxyCytosine, 2'-succinoyl-long chain alkylamino-CPG 500)
  source 1..202: mol_type = other DNA
gagcaagataagctcctattccaacagttcttccagtcacaaatgtaagtgtaaatgtctccttatatgccctagaataagcactggcaatagccccacttccatggagattctccacaccaagtccatcttccttgcccacaacagaatcaataacccacctaatttcaccactgtctagctgcatcttatgtgctatgac

SEQ ID NO: 108 - DNA, 202 bp, synthetic construct
  misc_feature 1..202: note = Synthetic
  modified_base 1: mod_base = OTHER; note = CY3 (Cyanine 3)
  modified_base 202: mod_base = OTHER; note = 3'DMT dC CPG (5'-Dimethoxytrityl-N-benzoyl-3'-deoxyCytosine, 2'-succinoyl-long chain alkylamino-CPG 500)
  source 1..202: mol_type = other DNA
gagcaagataagctcctattccaacagttcttccagtcacaaatgtaagtgtaaatgtctccttatatgccctagaataagcactggcaatagcaccacttccatgtagattctccacaccaagtccatcttccttgcccacaacagaatcaataacccacctaatttcaccactgtctagctgcatcttatgtgctatgac

SEQ ID NO: 109 - DNA, 202 bp, synthetic construct
  misc_feature 1..202: note = Synthetic
  modified_base 1: mod_base = OTHER; note = CY3 (Cyanine 3)
  modified_base 202: mod_base = OTHER; note = 3'DMT dC CPG (5'-Dimethoxytrityl-N-benzoyl-3'-deoxyCytosine, 2'-succinoyl-long chain alkylamino-CPG 500)
  source 1..202: mol_type = other DNA
gagcaagataagctcctattccaacagttcttccagtcacaaatgtaagtgtaaatgtctccttatatgccctagaataagcactggcaatagcgccacttccatgcagattctccacaccaagtccatcttccttgcccacaacagaatcaataacccacctaatttcaccactgtctagctgcatcttatgtgctatgac

SEQ ID NO: 110 - DNA, 114 bp, synthetic construct
  misc_feature 1..114: note = Synthetic
  modified_base 1: mod_base = OTHER; note = CY3 (Cyanine 3)
  modified_base 114: mod_base = OTHER; note = 3'DMT dC CPG (5'-Dimethoxytrityl-N-benzoyl-3'-deoxyCytosine, 2'-succinoyl-long chain alkylamino-CPG 500)
  source 1..114: mol_type = other DNA
taagtgtaaatgtctccttatatgccctagaataagcactggcaatagcagcacttccatgtatattctccacaccaagtccatcttccttgcccacaacagaatcaataaccc

SEQ ID NO: 111 - DNA, 114 bp, synthetic construct
  misc_feature 1..114: note = Synthetic
  modified_base 1: mod_base = OTHER; note = CY3 (Cyanine 3)
  modified_base 114: mod_base = OTHER; note = 3'DMT dC CPG (5'-Dimethoxytrityl-N-benzoyl-3'-deoxyCytosine, 2'-succinoyl-long chain alkylamino-CPG 500)
  source 1..114: mol_type = other DNA
taagtgtaaatgtctccttatatgccctagaataagcactggcaatagcagcacttccatgaagattctccacaccaagtccatcttccttgcccacaacagaatcaataaccc

SEQ ID NO: 112 - DNA, 114 bp, synthetic construct
  misc_feature 1..114: note = Synthetic
  modified_base 1: mod_base = OTHER; note = CY3 (Cyanine 3)
  modified_base 114: mod_base = OTHER; note = 3'DMT dC CPG (5'-Dimethoxytrityl-N-benzoyl-3'-deoxyCytosine, 2'-succinoyl-long chain alkylamino-CPG 500)
  source 1..114: mol_type = other DNA
taagtgtaaatgtctccttatatgccctagaataagcactggcaatagcagcacttccatggagattctccacaccaagtccatcttccttgcccacaacagaatcaataaccc

SEQ ID NO: 113 - DNA, 114 bp, synthetic construct
  misc_feature 1..114: note = Synthetic
  modified_base 1: mod_base = OTHER; note = CY3 (Cyanine 3)
  modified_base 114: mod_base = OTHER; note = 3'DMT dC CPG (5'-Dimethoxytrityl-N-benzoyl-3'-deoxyCytosine, 2'-succinoyl-long chain alkylamino-CPG 500)
  source 1..114: mol_type = other DNA
taagtgtaaatgtctccttatatgccctagaataagcactggcaatagcagcacttccatgtagattctccacaccaagtccatcttccttgcccacaacagaatcaataaccc

SEQ ID NO: 114 - DNA, 114 bp, synthetic construct
  misc_feature 1..114: note = Synthetic
  modified_base 1: mod_base = OTHER; note = CY3 (Cyanine 3)
  modified_base 114: mod_base = OTHER; note = 3'DMT dC CPG (5'-Dimethoxytrityl-N-benzoyl-3'-deoxyCytosine, 2'-succinoyl-long chain alkylamino-CPG 500)
  source 1..114: mol_type = other DNA
taagtgtaaatgtctccttatatgccctagaataagcactggcaatagcagcacttccatgcagattctccacaccaagtccatcttccttgcccacaacagaatcaataaccc

SEQ ID NO: 115 - DNA, 114 bp, synthetic construct
  misc_feature 1..114: note = Synthetic
  modified_base 1: mod_base = OTHER; note = CY3 (Cyanine 3)
  modified_base 114: mod_base = OTHER; note = 3'DMT dC CPG (5'-Dimethoxytrityl-N-benzoyl-3'-deoxyCytosine, 2'-succinoyl-long chain alkylamino-CPG 500)
  source 1..114: mol_type = other DNA
taagtgtaaatgtctccttatatgccctagaataagcactggcaatagcagcacttccatgagtattctccacaccaagtccatcttccttgcccacaacagaatcaataaccc

SEQ ID NO: 116 - DNA, 114 bp, synthetic construct
  misc_feature 1..114: note = Synthetic
  modified_base 1: mod_base = OTHER; note = CY3 (Cyanine 3)
  modified_base 114: mod_base = OTHER; note = 3'DMT dC CPG (5'-Dimethoxytrityl-N-benzoyl-3'-deoxyCytosine, 2'-succinoyl-long chain alkylamino-CPG 500)
  source 1..114: mol_type = other DNA
taagtgtaaatgtctccttatatgccctagaataagcactggcaatagcagcacttccatgggtattctccacaccaagtccatcttccttgcccacaacagaatcaataaccc

SEQ ID NO: 117 - DNA, 114 bp, synthetic construct
  misc_feature 1..114: note = Synthetic
  modified_base 1: mod_base = OTHER; note = CY3 (Cyanine 3)
  modified_base 114: mod_base = OTHER; note = 3'DMT dC CPG (5'-Dimethoxytrityl-N-benzoyl-3'-deoxyCytosine, 2'-succinoyl-long chain alkylamino-CPG 500)
  source 1..114: mol_type = other DNA
taagtgtaaatgtctccttatatgccctagaataagcactggcaatagcagcacttccatgtgtattctccacaccaagtccatcttccttgcccacaacagaatcaataaccc

SEQ ID NO: 118 - DNA, 114 bp, synthetic construct
  misc_feature 1..114: note = Synthetic
  modified_base 1: mod_base = OTHER; note = CY3 (Cyanine 3)
  modified_base 114: mod_base = OTHER; note = 3'DMT dC CPG (5'-Dimethoxytrityl-N-benzoyl-3'-deoxyCytosine, 2'-succinoyl-long chain alkylamino-CPG 500)
  source 1..114: mol_type = other DNA
taagtgtaaatgtctccttatatgccctagaataagcactggcaatagcagcacttccatgcgtattctccacaccaagtccatcttccttgcccacaacagaatcaataaccc

SEQ ID NO: 119 - DNA, 114 bp, synthetic construct
  misc_feature 1..114: note = Synthetic
  modified_base 1: mod_base = OTHER; note = CY3 (Cyanine 3)
  modified_base 114: mod_base = OTHER; note = 3'DMT dC CPG (5'-Dimethoxytrityl-N-benzoyl-3'-deoxyCytosine, 2'-succinoyl-long chain alkylamino-CPG 500)
  source 1..114: mol_type = other DNA
taagtgtaaatgtctccttatatgccctagaataagcactggcaatagctccacttccatgaagattctccacaccaagtccatcttccttgcccacaacagaatcaataaccc

SEQ ID NO: 120 - DNA, 114 bp, synthetic construct
  misc_feature 1..114: note = Synthetic
  modified_base 1: mod_base = OTHER; note = CY3 (Cyanine 3)
  modified_base 114: mod_base = OTHER; note = 3'DMT dC CPG (5'-Dimethoxytrityl-N-benzoyl-3'-deoxyCytosine, 2'-succinoyl-long chain alkylamino-CPG 500)
  source 1..114: mol_type = other DNA
taagtgtaaatgtctccttatatgccctagaataagcactggcaatagccccacttccatggagattctccacaccaagtccatcttccttgcccacaacagaatcaataaccc

SEQ ID NO: 121 - DNA, 114 bp, synthetic construct
  misc_feature 1..114: note = Synthetic
  modified_base 1: mod_base = OTHER; note = CY3 (Cyanine 3)
  modified_base 114: mod_base = OTHER; note = 3'DMT dC CPG (5'-Dimethoxytrityl-N-benzoyl-3'-deoxyCytosine, 2'-succinoyl-long chain alkylamino-CPG 500)
  source 1..114: mol_type = other DNA
taagtgtaaatgtctccttatatgccctagaataagcactggcaatagcaccacttccatgtagattctccacaccaagtccatcttccttgcccacaacagaatcaataaccc

SEQ ID NO: 122 - DNA, 114 bp, synthetic construct
  misc_feature 1..114: note = Synthetic
  modified_base 1: mod_base = OTHER; note = CY3 (Cyanine 3)
  modified_base 114: mod_base = OTHER; note = 3'DMT dC CPG (5'-Dimethoxytrityl-N-benzoyl-3'-deoxyCytosine, 2'-succinoyl-long chain alkylamino-CPG 500)
  source 1..114: mol_type = other DNA
taagtgtaaatgtctccttatatgccctagaataagcactggcaatagcgccacttccatgcagattctccacaccaagtccatcttccttgcccacaacagaatcaataaccc

SEQ ID NO: 123 - DNA, 104 bp, synthetic construct
  misc_feature 1..104: note = Synthetic
  modified_base 1: mod_base = OTHER; note = CY3 (Cyanine 3)
  modified_base 104: mod_base = OTHER; note = 3'DMT dC CPG (5'-Dimethoxytrityl-N-benzoyl-3'-deoxyCytosine, 2'-succinoyl-long chain alkylamino-CPG 500)
  source 1..104: mol_type = other DNA
gataaacccagaccgcattgagtgctatgctgagaggactgcaaaaggcagtgctctcgaaccgcaagggttaattgagatcaagttcaggtcagaggaactcc

SEQ ID NO: 124 - DNA, 104 bp, synthetic construct
  misc_feature 1..104: note = Synthetic
  modified_base 1: mod_base = OTHER; note = CY3 (Cyanine 3)
  modified_base 104: mod_base = OTHER; note = 3'DMT dC CPG (5'-Dimethoxytrityl-N-benzoyl-3'-deoxyCytosine, 2'-succinoyl-long chain alkylamino-CPG 500)
  source 1..104: mol_type = other DNA
gataaacccagaccgcattgagtgctatgctgagaggactgcaaaaggcagtgctctggaaccgcaagggttaattgagatcaagttcaggtcagaggaactcc

SEQ ID NO: 125 - DNA, 104 bp, synthetic construct
  misc_feature 1..104: note = Synthetic
  modified_base 1: mod_base = OTHER; note = CY3 (Cyanine 3)
  modified_base 104: mod_base = OTHER; note = 3'DMT dC CPG (5'-Dimethoxytrityl-N-benzoyl-3'-deoxyCytosine, 2'-succinoyl-long chain alkylamino-CPG 500)
  source 1..104: mol_type = other DNA
ggagttcctctgacctgaacttgatctcaattaacccttgcggttcgagagcactgccttttgcagtcctctcagcatagcactcaatgcggtctgggtttatc

SEQ ID NO: 126 - DNA, 104 bp, synthetic construct
  misc_feature 1..104: note = Synthetic
  modified_base 1: mod_base = OTHER; note = CY3 (Cyanine 3)
  modified_base 104: mod_base = OTHER; note = 3'DMT dC CPG (5'-Dimethoxytrityl-N-benzoyl-3'-deoxyCytosine, 2'-succinoyl-long chain alkylamino-CPG 500)
  source 1..104: mol_type = other DNA
ggagttcctctgacctgaacttgatctcaattaacccttgcggttccagagcactgccttttgcagtcctctcagcatagcactcaatgcggtctgggtttatc

SEQ ID NO: 127 - DNA, 104 bp, synthetic construct
  misc_feature 1..104: note = Synthetic
  modified_base 1: mod_base = OTHER; note = CY3 (Cyanine 3)
  modified_base 104: mod_base = OTHER; note = 3'DMT dC CPG (5'-Dimethoxytrityl-N-benzoyl-3'-deoxyCytosine, 2'-succinoyl-long chain alkylamino-CPG 500)
  source 1..104: mol_type = other DNA
gataaacccagaccgcattgagtgctatgctgagaggactgcaaaaggcagtggtctcgaaccgcaagggttaattgagatcaagttcaggtcagaggaactcc

SEQ ID NO: 128 - DNA, 104 bp, synthetic construct
  misc_feature 1..104: note = Synthetic
  modified_base 1: mod_base = OTHER; note = CY3 (Cyanine 3)
  modified_base 104: mod_base = OTHER; note = 3'DMT dC CPG (5'-Dimethoxytrityl-N-benzoyl-3'-deoxyCytosine, 2'-succinoyl-long chain alkylamino-CPG 500)
  source 1..104: mol_type = other DNA
gataaacccagaccgcattgagtgctatgctgagaggactgcaaaaggcagtggtctggaaccgcaagggttaattgagatcaagttcaggtcagaggaactcc

SEQ ID NO: 129 - DNA, 104 bp, synthetic construct
  misc_feature 1..104: note = Synthetic
  modified_base 1: mod_base = OTHER; note = CY3 (Cyanine 3)
  modified_base 104: mod_base = OTHER; note = 3'DMT dC CPG (5'-Dimethoxytrityl-N-benzoyl-3'-deoxyCytosine, 2'-succinoyl-long chain alkylamino-CPG 500)
  source 1..104: mol_type = other DNA
ggagttcctctgacctgaacttgatctcaattaacccttgcggttcgagaccactgccttttgcagtcctctcagcatagcactcaatgcggtctgggtttatc

SEQ ID NO: 130 - DNA, 104 bp, synthetic construct
  misc_feature 1..104: note = Synthetic
  modified_base 1: mod_base = OTHER; note = CY3 (Cyanine 3)
  modified_base 104: mod_base = OTHER; note = 3'DMT dC CPG (5'-Dimethoxytrityl-N-benzoyl-3'-deoxyCytosine, 2'-succinoyl-long chain alkylamino-CPG 500)
  source 1..104: mol_type = other DNA
ggagttcctctgacctgaacttgatctcaattaacccttgcggttccagaccactgccttttgcagtcctctcagcatagcactcaatgcggtctgggtttatc

SEQ ID NO: 131 - DNA, 104 bp, synthetic construct
  misc_feature 1..104: note = Synthetic
  modified_base 1: mod_base = OTHER; note = CY3 (Cyanine 3)
  modified_base 104: mod_base = OTHER; note = 3'DMT dC CPG (5'-Dimethoxytrityl-N-benzoyl-3'-deoxyCytosine, 2'-succinoyl-long chain alkylamino-CPG 500)
  source 1..104: mol_type = other DNA
gataaacccagaccgcattgagtgctatgctgagaggactgcaaaaggcaatgctctcgaaccgcaagggttaattgagatcaagttcaggtcagaggaactcc

SEQ ID NO: 132 - DNA, 104 bp, synthetic construct
  misc_feature 1..104: note = Synthetic
  modified_base 1: mod_base = OTHER; note = CY3 (Cyanine 3)
  modified_base 104: mod_base = OTHER; note = 3'DMT dC CPG (5'-Dimethoxytrityl-N-benzoyl-3'-deoxyCytosine, 2'-succinoyl-long chain alkylamino-CPG 500)
  source 1..104: mol_type = other DNA
gataaacccagaccgcattgagtgctatgctgagaggactgcaaaaggcaatgctctggaaccgcaagggttaattgagatcaagttcaggtcagaggaactcc

SEQ ID NO: 133 - DNA, 104 bp, synthetic construct
  misc_feature 1..104: note = Synthetic
  modified_base 1: mod_base = OTHER; note = CY3 (Cyanine 3)
  modified_base 104: mod_base = OTHER; note = 3'DMT dC CPG (5'-Dimethoxytrityl-N-benzoyl-3'-deoxyCytosine, 2'-succinoyl-long chain alkylamino-CPG 500)
  source 1..104: mol_type = other DNA
ggagttcctctgacctgaacttgatctcaattaacccttgcggttcgagatcactgccttttgcagtcctctcagcatagcactcaatgcggtctgggtttatc

SEQ ID NO: 134 - DNA, 104 bp, synthetic construct
  misc_feature 1..104: note = Synthetic
  modified_base 1: mod_base = OTHER; note = CY3 (Cyanine 3)
  modified_base 104: mod_base = OTHER; note = 3'DMT dC CPG (5'-Dimethoxytrityl-N-benzoyl-3'-deoxyCytosine, 2'-succinoyl-long chain alkylamino-CPG 500)
  source 1..104: mol_type = other DNA
ggagttcctctgacctgaacttgatctcaattaacccttgcggttccagatcactgccttttgcagtcctctcagcatagcactcaatgcggtctgggtttatc

SEQ ID NO: 135 - DNA, 104 bp, synthetic construct
  misc_feature 1..104: note = Synthetic
  modified_base 1: mod_base = OTHER; note = CY3 (Cyanine 3)
  modified_base 104: mod_base = OTHER; note = 3'DMT dC CPG (5'-Dimethoxytrityl-N-benzoyl-3'-deoxyCytosine, 2'-succinoyl-long chain alkylamino-CPG 500)
  source 1..104: mol_type = other DNA
gataaacccagaccgcattgagtgctatgctgagaggactgcaaaaggcaatggtctcgaaccgcaagggttaattgagatcaagttcaggtcagaggaactcc

SEQ ID NO: 136 - DNA, 104 bp, synthetic construct
  misc_feature 1..104: note = Synthetic
  modified_base 1: mod_base = OTHER; note = CY3 (Cyanine 3)
  modified_base 104: mod_base = OTHER; note = 3'DMT dC CPG (5'-Dimethoxytrityl-N-benzoyl-3'-deoxyCytosine, 2'-succinoyl-long chain alkylamino-CPG 500)
  source 1..104: mol_type = other DNA
gataaacccagaccgcattgagtgctatgctgagaggactgcaaaaggcaatggtctggaaccgcaagggttaattgagatcaagttcaggtcagaggaactcc

SEQ ID NO: 137 - DNA, 104 bp, synthetic construct; identical to SEQ ID NO: 133
  misc_feature 1..104: note = Synthetic
  modified_base 1: mod_base = OTHER; note = CY3 (Cyanine 3)
  modified_base 104: mod_base = OTHER; note = 3'DMT dC CPG (5'-Dimethoxytrityl-N-benzoyl-3'-deoxyCytosine, 2'-succinoyl-long chain alkylamino-CPG 500)
  source 1..104: mol_type = other DNA

SEQ ID NO: 138 - DNA, 104 bp, synthetic construct; identical to SEQ ID NO: 134
  misc_feature 1..104: note = Synthetic
  modified_base 1: mod_base = OTHER; note = CY3 (Cyanine 3)
  modified_base 104: mod_base = OTHER; note = 3'DMT dC CPG (5'-Dimethoxytrityl-N-benzoyl-3'-deoxyCytosine, 2'-succinoyl-long chain alkylamino-CPG 500)
  source 1..104: mol_type = other DNA

SEQ ID NO: 139 - DNA, 202 bp, synthetic construct
  misc_feature 1..202: note = Synthetic
  modified_base 1: mod_base = OTHER; note = CY3 (Cyanine 3)
  modified_base 202: mod_base = OTHER; note = 3'DMT dC CPG (5'-Dimethoxytrityl-N-benzoyl-3'-deoxyCytosine, 2'-succinoyl-long chain alkylamino-CPG 500)
  source 1..202: mol_type = other DNA
ggctcgactattgttgagaaccttaggacatacaatcagcctgcctttgtctacattcccatggctgcagagctacgaggaggggcttgggttgtggttgatagcaagataaacccagaccgcattgagtgctatgctgagaggactgcaaaaggcaatgttctggaaccgcaagggttaattgagatcaagttcaggtcag

SEQ ID NO: 140 - DNA, 202 bp, synthetic construct
  misc_feature 1..202: note = Synthetic
  modified_base 1: mod_base = OTHER; note = CY3 (Cyanine 3)
  modified_base 202: mod_base = OTHER; note = 3'DMT dC CPG (5'-Dimethoxytrityl-N-benzoyl-3'-deoxyCytosine, 2'-succinoyl-long chain alkylamino-CPG 500)
  source 1..202: mol_type = other DNA
ggctcgactattgttgagaaccttaggacatacaatcagcctgcctttgtctacattcccatggctgcagagctacgaggaggggcttgggttgtggttggaagcaagataaacccagaccgcattgagtgctatgctgagaggactgcaaaaggcaatgttctggaaccgcaagggttaattgagatcaagttcaggtcag

SEQ ID NO: 141 - DNA, 202 bp, synthetic construct
  misc_feature 1..202: note = Synthetic
  modified_base 1: mod_base = OTHER; note = CY3 (Cyanine 3)
  modified_base 202: mod_base = OTHER; note = 3'DMT dC CPG (5'-Dimethoxytrityl-N-benzoyl-3'-deoxyCytosine, 2'-succinoyl-long chain alkylamino-CPG 500)
  source 1..202: mol_type = other DNA
ggctcgactattgttgagaaccttaggacatacaatcagcctgcctttgtctacattcccatggctgcagagctacgaggaggggcttgggttgtcgttgatagcaagataaacccagaccgcattgagtgctatgctgagaggactgcaaaaggcaatgttctggaaccgcaagggttaattgagatcaagttcaggtcag

SEQ ID NO: 142 - DNA, 202 bp, synthetic construct
  misc_feature 1..202: note = Synthetic
  modified_base 1: mod_base = OTHER; note = CY3 (Cyanine 3)
  modified_base 202: mod_base = OTHER; note = 3'DMT dC CPG (5'-Dimethoxytrityl-N-benzoyl-3'-deoxyCytosine, 2'-succinoyl-long chain alkylamino-CPG 500)
  source 1..202: mol_type = other DNA
ggctcgactattgttgagaaccttaggacatacaatcagcctgcctttgtctacattcccatggctgcagagctacgaggaggggcttgggttgtcgttggaagcaagataaacccagaccgcattgagtgctatgctgagaggactgcaaaaggcaatgttctggaaccgcaagggttaattgagatcaagttcaggtcag

SEQ ID NO: 143 - DNA, 202 bp, synthetic construct
  misc_feature 1..202: note = Synthetic
  modified_base 1: mod_base = OTHER; note = CY3 (Cyanine 3)
  modified_base 202: mod_base = OTHER; note = 3'DMT dC CPG (5'-Dimethoxytrityl-N-benzoyl-3'-deoxyCytosine, 2'-succinoyl-long chain alkylamino-CPG 500)
  source 1..202: mol_type = other DNA
ggctcgactattgttgagaaccttaggacatacaatcagcctgcctttgtctacattcccatggctgcagagctacgaggaggcgcttgggttgtggttgatagcaagataaacccagaccgcattgagtgctatgctgagaggactgcaaaaggcaatgttctggaaccgcaagggttaattgagatcaagttcaggtcag

SEQ ID NO: 144 - DNA, 202 bp, synthetic construct
  misc_feature 1..202: note = Synthetic
  modified_base 1: mod_base = OTHER; note = CY3 (Cyanine 3)
  modified_base 202: mod_base = OTHER; note = 3'DMT dC CPG (5'-Dimethoxytrityl-N-benzoyl-3'-deoxyCytosine, 2'-succinoyl-long chain alkylamino-CPG 500)
  source 1..202: mol_type = other DNA
ggctcgactattgttgagaaccttaggacatacaatcagcctgcctttgtctacattcccatggctgcagagctacgaggaggcgcttgggttgtggttggaagcaagataaacccagaccgcattgagtgctatgctgagaggactgcaaaaggcaatgttctggaaccgcaagggttaattgagatcaagttcaggtcag

SEQ ID NO: 145 - DNA, 202 bp, synthetic construct
  misc_feature 1..202: note = Synthetic
  modified_base 1: mod_base = OTHER; note = CY3 (Cyanine 3)
  modified_base 202: mod_base = OTHER; note = 3'DMT dC CPG (5'-Dimethoxytrityl-N-benzoyl-3'-deoxyCytosine, 2'-succinoyl-long chain alkylamino-CPG 500)
  source 1..202: mol_type = other DNA
ctgacctgaacttgatctcaattaacccttgcggttccagaacattgccttttgcagtcctctcagcatagcactcaatgcggtctgggtttatcttgctatcaaccacaacccaagcccctcctcgtagctctgcagccatgggaatgtagacaaaggcaggctgattgtatgtcctaaggttctcaacaatagtcgagcc

SEQ ID NO: 146 - DNA, 202 bp, synthetic construct
  misc_feature 1..202: note = Synthetic
  modified_base 1: mod_base = OTHER; note = CY3 (Cyanine 3)
  modified_base 202: mod_base = OTHER; note = 3'DMT dC CPG (5'-Dimethoxytrityl-N-benzoyl-3'-deoxyCytosine, 2'-succinoyl-long chain alkylamino-CPG 500)
  source 1..202: mol_type = other DNA
ctgacctgaacttgatctcaattaacccttgcggttccagaacattgccttttgcagtcctctcagcatagcactcaatgcggtctgggtttatcttgcttccaaccacaacccaagcccctcctcgtagctctgcagccatgggaatgtagacaaaggcaggctgattgtatgtcctaaggttctcaacaatagtcgagcc

SEQ ID NO: 147 - DNA, 202 bp, synthetic construct
  misc_feature 1..202: note = Synthetic
  modified_base 1: mod_base = OTHER; note = CY3 (Cyanine 3)
  modified_base 202: mod_base = OTHER; note = 3'DMT dC CPG (5'-Dimethoxytrityl-N-benzoyl-3'-deoxyCytosine, 2'-succinoyl-long chain alkylamino-CPG 500)
  source 1..202: mol_type = other DNA
ctgacctgaacttgatctcaattaacccttgcggttccagaacattgccttttgcagtcctctcagcatagcactcaatgcggtctgggtttatcttgctatcaacgacaacccaagcccctcctcgtagctctgcagccatgggaatgtagacaaaggcaggctgattgtatgtcctaaggttctcaacaatagtcgagcc

SEQ ID NO: 148 - DNA, 202 bp, synthetic construct
  misc_feature 1..202: note = Synthetic
  modified_base 1: mod_base = OTHER; note = CY3 (Cyanine 3)
  modified_base 202: mod_base = OTHER; note = 3'DMT dC CPG (5'-Dimethoxytrityl-N-benzoyl-3'-deoxyCytosine, 2'-succinoyl-long chain alkylamino-CPG 500)
  source 1..202: mol_type = other DNA
ctgacctgaacttgatctcaattaacccttgcggttccagaacattgccttttgcagtcctctcagcatagcactcaatgcggtctgggtttatcttgcttccaacgacaacccaagcccctcctcgtagctctgcagccatgggaatgtagacaaaggcaggctgattgtatgtcctaaggttctcaacaatagtcgagcc

SEQ ID NO: 149 - DNA, 202 bp, synthetic construct
  misc_feature 1..202: note = Synthetic
  modified_base 1: mod_base = OTHER; note = CY3 (Cyanine 3)
  modified_base 202: mod_base = OTHER; note = 3'DMT dC CPG (5'-Dimethoxytrityl-N-benzoyl-3'-deoxyCytosine, 2'-succinoyl-long chain alkylamino-CPG 500)
  source 1..202: mol_type = other DNA
ctgacctgaacttgatctcaattaacccttgcggttccagaacattgccttttgcagtcctctcagcatagcactcaatgcggtctgggtttatcttgctatcaaccacaacccaagcgcctcctcgtagctctgcagccatgggaatgtagacaaaggcaggctgattgtatgtcctaaggttctcaacaatagtcgagcc

SEQ ID NO: 150 - DNA, 202 bp, synthetic construct
  misc_feature 1..202: note = Synthetic
  modified_base 1: mod_base = OTHER; note = CY3 (Cyanine 3)
  modified_base 202: mod_base = OTHER; note = 3'DMT dC CPG (5'-Dimethoxytrityl-N-benzoyl-3'-deoxyCytosine, 2'-succinoyl-long chain alkylamino-CPG 500)
  source 1..202: mol_type = other DNA
ctgacctgaacttgatctcaattaacccttgcggttccagaacattgccttttgcagtcctctcagcatagcactcaatgcggtctgggtttatcttgcttccaaccacaacccaagcgcctcctcgtagctctgcagccatgggaatgtagacaaaggcaggctgattgtatgtcctaaggttctcaacaatagtcgagcc

SEQ ID NO: 151 - DNA, 91 bp, synthetic construct
  misc_feature 1..91: note = Synthetic
  modified_base 1: mod_base = OTHER; note = CY3 (Cyanine 3)
  modified_base 91: mod_base = OTHER; note = 3'DMT dC CPG (5'-Dimethoxytrityl-N-benzoyl-3'-deoxyCytosine, 2'-succinoyl-long chain alkylamino-CPG 500)
  source 1..91: mol_type = other DNA
tctcagcatagcactcaatgcggtctgggtttatcttgcttccaacgacaacccaagcccctcctcgtagctctgcagccatgggaatgta

SEQ ID NO: 152 - DNA, 91 bp, synthetic construct; identical to SEQ ID NO: 151
  misc_feature 1..91: note = Synthetic
  modified_base 1: mod_base = OTHER; note = CY3 (Cyanine 3)
  modified_base 91: mod_base = OTHER; note = 3'DMT dC CPG (5'-Dimethoxytrityl-N-benzoyl-3'-deoxyCytosine, 2'-succinoyl-long chain alkylamino-CPG 500)
  source 1..91: mol_type = other DNA

SEQ ID NO: 153 - DNA, 100 bp, synthetic construct
  misc_feature 1..100: note = Synthetic
  modified_base 1: mod_base = OTHER; note = CY3 (Cyanine 3)
  modified_base 100: mod_base = OTHER; note = 3'DMT dC CPG (5'-Dimethoxytrityl-N-benzoyl-3'-deoxyCytosine, 2'-succinoyl-long chain alkylamino-CPG 500)
  source 1..100: mol_type = other DNA
ttgcagtcctctcagcatagcactcaatgcggtctgggtttatcttgcttccaacgacaacccaagcccctcctcgtagctctgcagccatgggaatgta

SEQ ID NO: 154 - DNA, 100 bp, synthetic construct; identical to SEQ ID NO: 153
  misc_feature 1..100: note = Synthetic
  modified_base 1: mod_base = OTHER; note = CY3 (Cyanine 3)
  modified_base 100: mod_base = OTHER; note = 3'DMT dC CPG (5'-Dimethoxytrityl-N-benzoyl-3'-deoxyCytosine, 2'-succinoyl-long chain alkylamino-CPG 500)
  source 1..100: mol_type = other DNA

SEQ ID NO: 155 - DNA, 201 bp, synthetic construct
  misc_feature 1..201: note = Synthetic
  modified_base 1: mod_base = OTHER; note = CY3 (Cyanine 3)
  modified_base 201: mod_base = OTHER; note = 3'DMT dC CPG (5'-Dimethoxytrityl-N-benzoyl-3'-deoxyCytosine, 2'-succinoyl-long chain alkylamino-CPG 500)
  source 1..201: mol_type = other DNA
gctcgactattgttgagaaccttaggacatacaatcagcctgcctttgtctacattcccatggctgcagagctacgaggaggggcttgggttgtcgttggtagcaagataaacccagaccgcattgagtgctatgctgagaggactgcaaaaggcaatgttctggaaccgcaagggttaattgagatcaagttcaggtcag

SEQ ID NO: 156 - DNA, 100 bp, synthetic construct
  misc_feature 1..100: note = Synthetic
  modified_base 1: mod_base = OTHER; note = CY3 (Cyanine 3)
  modified_base 100: mod_base = OTHER; note = 3'DMT dC CPG (5'-Dimethoxytrityl-N-benzoyl-3'-deoxyCytosine, 2'-succinoyl-long chain alkylamino-CPG 500)
  source 1..100: mol_type = other DNA
tacattcccatggctgcagagctacgaggaggggcttgggttgtcgttggtagcaagataaacccagaccgcattgagtgctatgctgagaggactgcaa

SEQ ID NO: 157 - DNA, 100 bp, synthetic construct
  misc_feature 1..100: note = Synthetic
  modified_base 1: mod_base = OTHER; note = CY3 (Cyanine 3)
  modified_base 100: mod_base = OTHER; note = 3'DMT dC CPG (5'-Dimethoxytrityl-N-benzoyl-3'-deoxyCytosine, 2'-succinoyl-long chain alkylamino-CPG 500)
  source 1..100: mol_type = other DNA
tacattcccatggctgcagagctacgaggaggggcttgggttgtcgttggtagcaagataaacccagaccgcattgagaactatgctgagaggactgcaa

SEQ ID NO: 158 - DNA, 100 bp, synthetic construct
  misc_feature 1..100: note = Synthetic
  modified_base 1: mod_base = OTHER; note = CY3 (Cyanine 3)
  modified_base 100: mod_base = OTHER; note = 3'DMT dC CPG (5'-Dimethoxytrityl-N-benzoyl-3'-deoxyCytosine, 2'-succinoyl-long chain alkylamino-CPG 500)
  source 1..100: mol_type = other DNA
tacattcccatggctgcagagctacgaggaggggcttgggttgtcgttgatagcaagataaacccagaccgcattgagaactatgctgagaggactgcaa

SEQ ID NO: 159 - DNA, 100 bp, synthetic construct
  misc_feature 1..100: note = Synthetic
  modified_base 1: mod_base = OTHER; note = CY3 (Cyanine 3)
  modified_base 100: mod_base = OTHER; note = 3'DMT dC CPG (5'-Dimethoxytrityl-N-benzoyl-3'-deoxyCytosine, 2'-succinoyl-long chain alkylamino-CPG 500)
  source 1..100: mol_type = other DNA
tacattcccatggctgcagagctacgaggaggggcttggcttgtcgttgatagcaagataaacccagaccgcattgagtgctatgctgagaggactgcaa

SEQ ID NO: 160 - DNA, 201 bp, synthetic construct
  misc_feature 1..201: note = Synthetic
  modified_base 1: mod_base = OTHER; note = CY3 (Cyanine 3)
  modified_base 201: mod_base = OTHER; note = 3'DMT dC CPG (5'-Dimethoxytrityl-N-benzoyl-3'-deoxyCytosine, 2'-succinoyl-long chain alkylamino-CPG 500)
  source 1..201: mol_type = other DNA
tgacctgaacttgatctcaattaacccttgcggttccagaacattgccttttgcagtcctctcagcatagcactcaatgcggtctgggtttatcttgctaccaacgacaacccaagcccctcctcgtagctctgcagccatgggaatgtagacaaaggcaggctgattgtatgtcctaaggttctcaacaatagtcgagcc

SEQ ID NO: 161 - DNA, 100 bp, synthetic construct
  misc_feature 1..100: note = Synthetic
  modified_base 1: mod_base = OTHER; note = CY3 (Cyanine 3)
  modified_base 100: mod_base = OTHER; note = 3'DMT dC CPG (5'-Dimethoxytrityl-N-benzoyl-3'-deoxyCytosine, 2'-succinoyl-long chain alkylamino-CPG 500)
  source 1..100: mol_type = other DNA
tgcagtcctctcagcatagcactcaatgcggtctgggtttatcttgctaccaacgacaacccaagcccctcctcgtagctctgcagccatgggaatgtag

SEQ ID NO: 162 - DNA, 100 bp, synthetic construct
  misc_feature 1..100: note = Synthetic
  modified_base 1: mod_base = OTHER; note = CY3 (Cyanine 3)
  modified_base 100: mod_base = OTHER; note = 3'DMT dC CPG (5'-Dimethoxytrityl-N-benzoyl-3'-deoxyCytosine, 2'-succinoyl-long chain alkylamino-CPG 500)
  source 1..100: mol_type = other DNA
tgcagtcctctcagcatagttctcaatgcggtctgggtttatcttgctaccaacgacaacccaagcccctcctcgtagctctgcagccatgggaatgtag

SEQ ID NO: 163 - DNA, 101 bp, synthetic construct
  misc_feature 1..101: note = Synthetic
  modified_base 1: mod_base = OTHER; note = CY3 (Cyanine 3)
  modified_base 101: mod_base = OTHER; note = 3'DMT dC CPG (5'-Dimethoxytrityl-N-benzoyl-3'-deoxyCytosine, 2'-succinoyl-long chain alkylamino-CPG 500)
  source 1..101: mol_type = other DNA
ttgcagtcctctcagcatagttctcaatgcggtctgggtttatcttgctatcaacgacaacccaagcccctcctcgtagctctgcagccatgggaatgtag

SEQ ID NO: 164 - DNA, 100 bp, synthetic construct
  misc_feature 1..100: note = Synthetic
  modified_base 1: mod_base = OTHER; note = CY3 (Cyanine 3)
  modified_base 100: mod_base = OTHER; note = 3'DMT dC CPG (5'-Dimethoxytrityl-N-benzoyl-3'-deoxyCytosine, 2'-succinoyl-long chain alkylamino-CPG 500)
  source 1..100: mol_type = other DNA
tgcagtcctctcagcatagcactcaatgcggtctgggtttatcttgctatcaacgacaagccaagcccctcctcgtagctctgcagccatgggaatgtag

SEQ ID NO: 165 - DNA, 202 bp, synthetic construct; identical to SEQ ID NO: 148
  misc_feature 1..202: note = Synthetic
  modified_base 1: mod_base = OTHER; note = CY3 (Cyanine 3)
  modified_base 202: mod_base = OTHER; note = 3'DMT dC CPG (5'-Dimethoxytrityl-N-benzoyl-3'-deoxyCytosine, 2'-succinoyl-long chain alkylamino-CPG 500)
  source 1..202: mol_type = other DNA

SEQ ID NO: 166 - DNA, 101 bp, synthetic construct
  misc_feature 1..101: note = Synthetic
  modified_base 1: mod_base = OTHER; note = CY3 (Cyanine 3)
  modified_base 101: mod_base = OTHER; note = 3'DMT dC CPG (5'-Dimethoxytrityl-N-benzoyl-3'-deoxyCytosine, 2'-succinoyl-long chain alkylamino-CPG 500)
  source 1..101: mol_type = other DNA
tttgcagtcctctcagcatagcactcaatgcggtctgggtttatcttgcttccaacgacaacccaagcccctcctcgtagctctgcagccatgggaatgta

SEQ ID NO: 167 - DNA, 99 bp, synthetic construct
  misc_feature 1..99: note = Synthetic
  modified_base 1: mod_base = OTHER; note = CY3 (Cyanine 3)
  modified_base 99: mod_base = OTHER; note = 3'DMT dC CPG (5'-Dimethoxytrityl-N-benzoyl-3'-deoxyCytosine, 2'-succinoyl-long chain alkylamino-CPG 500)
  source 1..99: mol_type = other DNA
tgcactgtggatatctaccgtgagatggaagataaagaatcacggaagttagtataccatcccgccactccggcggctggtcctctgcatggtgtggca

SEQ ID NO: 168 - DNA, 99 bp, synthetic construct
  misc_feature 1..99: note = Synthetic
  modified_base 1: mod_base = OTHER; note = CY3 (Cyanine 3)
  modified_base 99: mod_base = OTHER; note = 3'DMT dC CPG (5'-Dimethoxytrityl-N-benzoyl-3'-deoxyCytosine, 2'-succinoyl-long chain alkylamino-CPG 500)
  source 1..99: mol_type = other DNA
tgcactgtggatatctaccgtgagatggaagataaagaatcacggaaggttgtataccatcccgccactccggcggctggtcctctgcatggtgtggca

SEQ ID NO: 169 - DNA, 99 bp, synthetic construct
  misc_feature 1..99: note = Synthetic
  modified_base 1: mod_base = OTHER; note = CY3 (Cyanine 3)
  modified_base 99: mod_base = OTHER; note = 3'DMT dC CPG (5'-Dimethoxytrityl-N-benzoyl-3'-deoxyCytosine, 2'-succinoyl-long chain alkylamino-CPG 500)
  source 1..99: mol_type = other DNA
tgcactgtggatatctaccgtgagatggaagataaagaatcacggaaggtcgtataccatcccgccactccggcggctggtcctctgcatggtgtggca

SEQ ID NO: 170 - DNA, 99 bp, synthetic construct
  misc_feature 1..99: note = Synthetic
  modified_base 1: mod_base = OTHER; note = CY3 (Cyanine 3)
  modified_base 99: mod_base = OTHER; note = 3'DMT dC CPG (5'-Dimethoxytrityl-N-benzoyl-3'-deoxyCytosine, 2'-succinoyl-long chain alkylamino-CPG 500)
  source 1..99: mol_type = other DNA
tgcactgtggatatctaccgtgagatggaagataaagaatcacggaaggtagtataccatcccgccactccggcggctggtcctctgcatggtgtggca

SEQ ID NO: 171 - DNA, 99 bp, synthetic construct
  misc_feature 1..99: note = Synthetic
  modified_base 1: mod_base = OTHER; note = CY3 (Cyanine 3)
  modified_base 99: mod_base = OTHER; note = 3'DMT dC CPG (5'-Dimethoxytrityl-N-benzoyl-3'-deoxyCytosine, 2'-succinoyl-long chain alkylamino-CPG 500)
  source 1..99: mol_type = other DNA
tgcactgtggatatctaccgtgagatggaagataaagaatcacggaaggtggtataccatcccgccactccggcggctggtcctctgcatggtgtggca

SEQ ID NO: 172 - DNA, 99 bp, synthetic construct
  misc_feature 1..99: note = Synthetic
  modified_base 1: mod_base = OTHER; note = CY3 (Cyanine 3)
  modified_base 99: mod_base = OTHER; note = 3'DMT dC CPG (5'-Dimethoxytrityl-N-benzoyl-3'-deoxyCytosine, 2'-succinoyl-long chain alkylamino-CPG 500)
  source 1..99: mol_type = other DNA
tgcactgtggatatctaccgtgagatggaagataaagaatcacggaagtttgtataccatcccgccactccggcggctggtcctctgcatggtgtggca

SEQ ID NO: 173 - DNA, 99 bp, synthetic construct
  misc_feature 1..99: note = Synthetic
  modified_base 1: mod_base = OTHER; note = CY3 (Cyanine 3)
  modified_base 99: mod_base = OTHER; note = 3'DMT dC CPG (5'-Dimethoxytrityl-N-benzoyl-3'-deoxyCytosine, 2'-succinoyl-long chain alkylamino-CPG 500)
  source 1..99: mol_type = other DNA
tgcactgtggatatctaccgtgagatggaagataaagaatcacggaagttcgtataccatcccgccactccggcggctggtcctctgcatggtgtggca

SEQ ID NO: 174 - DNA, 99 bp, synthetic construct
  misc_feature 1..99: note = Synthetic
  modified_base 1: mod_base = OTHER; note = CY3 (Cyanine 3)
  modified_base 99: mod_base = OTHER; note = 3'DMT dC CPG (5'-Dimethoxytrityl-N-benzoyl-3'-deoxyCytosine, 2'-succinoyl-long chain alkylamino-CPG 500)
  source 1..99: mol_type = other DNA
tgcactgtggatatctaccgtgagatggaagataaagaatcacgcaaggttgtataccatcccgccactccggcggctggtcctctgcatggtgtggca

SEQ ID NO: 175 - DNA, 99 bp, synthetic construct
  misc_feature 1..99: note = Synthetic
  modified_base 1: mod_base = OTHER; note = CY3 (Cyanine 3)
  modified_base 99: mod_base = OTHER; note = 3'DMT dC CPG (5'-Dimethoxytrityl-N-benzoyl-3'-deoxyCytosine, 2'-succinoyl-long chain alkylamino-CPG 500)
  source 1..99: mol_type = other DNA
tgcactgtggatatctaccgtgagatggaagataaagaatcacgcaaggtcgtataccatcccgccactccggcggctggtcctctgcatggtgtggca

SEQ ID NO: 176 - DNA, 99 bp, synthetic construct
  misc_feature 1..99: note = Synthetic
  modified_base 1: mod_base = OTHER; note = CY3 (Cyanine 3)
  modified_base 99: mod_base = OTHER; note = 3'DMT dC CPG (5'-Dimethoxytrityl-N-benzoyl-3'-deoxyCytosine, 2'-succinoyl-long chain alkylamino-CPG 500)
  source 1..99: mol_type = other DNA
tgcactgtggatatctaccgtgagatggaagataaagaatcacgcaaggtagtataccatcccgccactccggcggctggtcctctgcatggtgtggca

SEQ ID NO: 177 - DNA, 99 bp, synthetic construct
  misc_feature 1..99: note = Synthetic
  modified_base 1: mod_base = OTHER; note = CY3 (Cyanine 3)
  modified_base 99: mod_base = OTHER; note = 3'DMT dC CPG (5'-Dimethoxytrityl-N-benzoyl-3'-deoxyCytosine, 2'-succinoyl-long chain alkylamino-CPG 500)
  source 1..99: mol_type = other DNA
tgcactgtggatatctaccgtgagatggaagataaagaatcacgcaaggtggtataccatcccgccactccggcggctggtcctctgcatggtgtggca

SEQ ID NO: 178 - DNA, 99 bp, synthetic construct
  misc_feature 1..99: note = Synthetic
  modified_base 1: mod_base = OTHER; note = CY3 (Cyanine 3)
  modified_base 99: mod_base = OTHER; note = 3'DMT dC CPG (5'-Dimethoxytrityl-N-benzoyl-3'-deoxyCytosine, 2'-succinoyl-long chain alkylamino-CPG 500)
  source 1..99: mol_type = other DNA
tgcactgtggatatctaccgtgagatggaagataaagaatcacgcaagtttgtataccatcccgccactccggcggctggtcctctgcatggtgtggca

SEQ ID NO: 179 - DNA, 99 bp, synthetic construct
  misc_feature 1..99: note = Synthetic
  modified_base 1: mod_base = OTHER; note = CY3 (Cyanine 3)
  modified_base 99: mod_base = OTHER; note = 3'DMT dC CPG (5'-Dimethoxytrityl-N-benzoyl-3'-deoxyCytosine, 2'-succinoyl-long chain alkylamino-CPG 500)
  source 1..99: mol_type = other DNA
tgcactgtggatatctaccgtgagatggaagataaagaatcacgcaagttcgtataccatcccgccactccggcggctggtcctctgcatggtgtggca

SEQ ID NO: 180 - DNA, 99 bp, synthetic construct
  misc_feature 1..99: note = Synthetic
  modified_base 1: mod_base = OTHER; note = CY3 (Cyanine 3)
  modified_base 99: mod_base = OTHER; note = 3'DMT dC CPG (5'-Dimethoxytrityl-N-benzoyl-3'-deoxyCytosine, 2'-succinoyl-long chain alkylamino-CPG 500)
  source 1..99: mol_type = other DNA
tgcactgtggatatctaccgtgagatggaagataaagaatcacggaaggttgtatatcatcccgccactccggcggctggtcctctgcatggtgtggca

SEQ ID NO: 181 - DNA, 99 bp, synthetic construct
  misc_feature 1..99: note = Synthetic
  modified_base 1: mod_base = OTHER; note = CY3 (Cyanine 3)
  modified_base 99: mod_base = OTHER; note = 3'DMT dC CPG (5'-Dimethoxytrityl-N-benzoyl-3'-deoxyCytosine, 2'-succinoyl-long chain alkylamino-CPG 500)
  source 1..99: mol_type = other DNA
tgcactgtggatatctaccgtgagatggaagataaagaatcacggaaggtcgtatatcatcccgccactccggcggctggtcctctgcatggtgtggca

SEQ ID NO: 182 - DNA, 99 bp, synthetic construct
  misc_feature 1..99: note = Synthetic
  modified_base 1: mod_base = OTHER; note = CY3 (Cyanine 3)
  modified_base 99: mod_base = OTHER; note = 3'DMT dC CPG (5'-Dimethoxytrityl-N-benzoyl-3'-deoxyCytosine, 2'-succinoyl-long chain alkylamino-CPG 500)
  source 1..99: mol_type = other DNA
tgcactgtggatatctaccgtgagatggaagataaagaatcacggaaggtagtatatcatcccgccactccggcggctggtcctctgcatggtgtggca

SEQ ID NO: 183 - DNA, 99 bp, synthetic construct
  misc_feature 1..99: note = Synthetic
  modified_base 1: mod_base = OTHER; note = CY3 (Cyanine 3)
  modified_base 99: mod_base = OTHER; note = 3'DMT dC CPG (5'-Dimethoxytrityl-N-benzoyl-3'-deoxyCytosine, 2'-succinoyl-long chain alkylamino-CPG 500)
  source 1..99: mol_type = other DNA
tgcactgtggatatctaccgtgagatggaagataaagaatcacggaaggtggtatatcatcccgccactccggcggctggtcctctgcatggtgtggca

SEQ ID NO: 184 - DNA, 99 bp, synthetic construct
  misc_feature 1..99: note = Synthetic
  modified_base 1: mod_base = OTHER; note = CY3 (Cyanine 3)
  modified_base 99: mod_base = OTHER; note = 3'DMT dC CPG (5'-Dimethoxytrityl-N-benzoyl-3'-deoxyCytosine, 2'-succinoyl-long chain alkylamino-CPG 500)
  source 1..99: mol_type = other DNA
tgcactgtggatatctaccgtgagatggaagataaagaatcacggaagtttgtatatcatcccgccactccggcggctggtcctctgcatggtgtggca

SEQ ID NO: 185 - DNA, 99 bp, synthetic construct
  misc_feature 1..99: note = Synthetic
  modified_base 1: mod_base = OTHER; note = CY3 (Cyanine 3)
  modified_base 99: mod_base = OTHER; note = 3'DMT dC CPG (5'-Dimethoxytrityl-N-benzoyl-3'-deoxyCytosine, 2'-succinoyl-long chain alkylamino-CPG 500)
  source 1..99: mol_type = other DNA
tgcactgtggatatctaccgtgagatggaagataaagaatcacggaagttcgtatatcatcccgccactccggcggctggtcctctgcatggtgtggca

SEQ ID NO: 186 - DNA, 99 bp, synthetic construct
  misc_feature 1..99: note = Synthetic
  modified_base 1: mod_base = OTHER; note = CY3 (Cyanine 3)
  modified_base 99: mod_base = OTHER; note = 3'DMT dC CPG (5'-Dimethoxytrityl-N-benzoyl-3'-deoxyCytosine, 2'-succinoyl-long chain alkylamino-CPG 500)
  source 1..99: mol_type = other DNA
tttcctagtggtagggagattattgttgttgcaaatgatattacgttcagagctggatcatttggcccaagggaagatgcattttttgaagctgttacc

SEQ ID NO: 187 - DNA, 99 bp, synthetic construct
  misc_feature 1..99: note = Synthetic
  modified_base 1: mod_base = OTHER; note = CY3 (Cyanine 3)
  modified_base 99: mod_base = OTHER; note = 3'DMT dC CPG (5'-Dimethoxytrityl-N-benzoyl-3'-deoxyCytosine, 2'-succinoyl-long chain alkylamino-CPG 500)
  source 1..99: mol_type = other DNA
tttcctagtggtagggagattattgttgttgcaaatgatattacgttcattgctggatcatttggcccaagggaagatgcattttttgaagctgttacc

SEQ ID NO: 188 - DNA, 99 bp, synthetic construct
  misc_feature 1..99: note = Synthetic
  modified_base 1: mod_base = OTHER; note = CY3 (Cyanine 3)
  modified_base 99: mod_base = OTHER; note = 3'DMT dC CPG (5'-Dimethoxytrityl-N-benzoyl-3'-deoxyCytosine, 2'-succinoyl-long chain alkylamino-CPG 500)
  source 1..99: mol_type = other DNA
tttcctagtggtagggagattattgttgttgcaaatgatattacgttcatcgctggatcatttggcccaagggaagatgcattttttgaagctgttacc

SEQ ID NO: 189 - DNA, 99 bp, synthetic construct
  misc_feature 1..99: note = Synthetic
  modified_base 1: mod_base = OTHER; note = CY3 (Cyanine 3)
  modified_base 99: mod_base = OTHER; note = 3'DMT dC CPG (5'-Dimethoxytrityl-N-benzoyl-3'-deoxyCytosine, 2'-succinoyl-long chain alkylamino-CPG 500)
  source 1..99: mol_type = other DNA
tttcctagtggtagggagattattgttgttgcaaatgatattacgttcatagctggatcatttggcccaagggaagatgcattttttgaagctgttacc

SEQ ID NO: 190 - DNA, 99 bp, synthetic construct
  misc_feature 1..99: note = Synthetic
  modified_base 1: mod_base = OTHER; note = CY3 (Cyanine 3)
  modified_base 99: mod_base = OTHER; note = 3'DMT dC CPG (5'-Dimethoxytrityl-N-benzoyl-3'-deoxyCytosine, 2'-succinoyl-long chain alkylamino-CPG 500)
  source 1..99: mol_type = other DNA
tttcctagtggtagggagattattgttgttgcaaatgatattacgttcattgctggttctttcggcccaagggaagatgcattttttgaagctgttacc

SEQ ID NO: 191 - DNA, 99 bp, synthetic construct
  misc_feature 1..99: note = Synthetic
  modified_base 1: mod_base = OTHER; note = CY3 (Cyanine 3)
  modified_base 99: mod_base = OTHER; note = 3'DMT dC CPG (5'-Dimethoxytrityl-N-benzoyl-3'-deoxyCytosine, 2'-succinoyl-long chain alkylamino-CPG 500)
  source 1..99: mol_type = other DNA
tttcctagtggtagggagattattgttgttgcaaatgatattacgttcatcgctggttctttcggcccaagggaagatgcattttttgaagctgttacc

SEQ ID NO: 192 - DNA, 99 bp, synthetic construct
  misc_feature 1..99: note = Synthetic
  modified_base 1: mod_base = OTHER; note = CY3 (Cyanine 3)
  modified_base 99: mod_base = OTHER; note = 3'DMT dC CPG (5'-Dimethoxytrityl-N-benzoyl-3'-deoxyCytosine, 2'-succinoyl-long chain alkylamino-CPG 500)
  source 1..99: mol_type = other DNA
tttcctagtggtagggagattattgttgttgcaaatgatattacgttcatagctggttctttcggcccaagggaagatgcattttttgaagctgttacc

SEQ ID NO: 193 - DNA, 101 bp, synthetic construct
  misc_feature 1..101: note = Synthetic
  modified_base 1: mod_base = OTHER; note = CY3 (Cyanine 3)
  modified_base 101: mod_base = OTHER; note = 3'DMT dC CPG (5'-Dimethoxytrityl-N-benzoyl-3'-deoxyCytosine, 2'-succinoyl-long chain alkylamino-CPG 500)
  source 1..101: mol_type = other DNA
aaagcttggtggaattccagtgggtgtgatagctgtggagactcagaccatgatgcaaactatccctgctgaccctggtcagcttgattcccgtgagcaat

SEQ ID NO: 194 - DNA, 101 bp, synthetic construct
  misc_feature 1..101: note = Synthetic
  modified_base 1: mod_base = OTHER; note = CY3 (Cyanine 3)
  modified_base 101: mod_base = OTHER; note = 3'DMT dC CPG (5'-Dimethoxytrityl-N-benzoyl-3'-deoxyCytosine, 2'-succinoyl-long chain alkylamino-CPG 500)
  source 1..101: mol_type = other DNA
aaagcttggtggaattccagtgggtgtgatagctgtggagactcagaccactatgcaaactatccctgctgaccctggtcagcttgattcccgtgagcaat

SEQ ID NO: 195 - DNA, 101 bp, synthetic construct
  misc_feature 1..101: note = Synthetic
  modified_base 1: mod_base = OTHER; note = CY3 (Cyanine 3)
  modified_base 101: mod_base = OTHER; note = 3'DMT dC CPG (5'-Dimethoxytrityl-N-benzoyl-3'-deoxyCytosine, 2'-succinoyl-long chain alkylamino-CPG 500)
  source 1..101: mol_type = other DNA
aaagcttggtggaattccagtgggtgtgatagctgtggagactcagaccaccatgcaaactatccctgctgaccctggtcagcttgattcccgtgagcaat

SEQ ID NO: 196 - DNA, 101 bp, synthetic construct
  misc_feature 1..101: note = Synthetic
  modified_base 1: mod_base = OTHER; note = CY3 (Cyanine 3)
  modified_base 101: mod_base = OTHER; note = 3'DMT dC CPG (5'-Dimethoxytrityl-N-benzoyl-3'-deoxyCytosine, 2'-succinoyl-long chain alkylamino-CPG 500)
  source 1..101: mol_type = other DNA
aaagcttggtggaattccagtgggtgtgatagctgtggagactcagaccacaatgcaaactatccctgctgaccctggtcagcttgattcccgtgagcaat

SEQ ID NO: 197 - DNA, 101 bp, synthetic construct
  misc_feature 1..101: note = Synthetic
  modified_base 1: mod_base = OTHER; note = CY3 (Cyanine 3)
  modified_base 101: mod_base = OTHER; note = 3'DMT dC CPG (5'-Dimethoxytrityl-N-benzoyl-3'-deoxyCytosine, 2'-succinoyl-long chain alkylamino-CPG 500)
  source 1..101: mol_type = other DNA
aaagcttggtggaattccagtgggtgtgatagctgtggagactcagaccacgatgcaaactatccctgctgaccctggtcagcttgattcccgtgagcaat

SEQ ID NO: 198 - DNA, 101 bp, synthetic construct
  misc_feature 1..101: note = Synthetic
  modified_base 1: mod_base = OTHER; note = CY3 (Cyanine 3)
  modified_base 101: mod_base = OTHER; note = 3'DMT dC CPG (5'-Dimethoxytrityl-N-benzoyl-3'-deoxyCytosine, 2'-succinoyl-long chain alkylamino-CPG 500)
  source 1..101: mol_type = other DNA
aaagcttggtggaattccagtgggtgtgatagctgtggagactcagacgactatgcaaactatccctgctgaccctggtcagcttgattcccgtgagcaat

SEQ ID NO: 199 - DNA, 101 bp, synthetic construct
  misc_feature 1..101: note = Synthetic
  modified_base 1: mod_base = OTHER; note = CY3 (Cyanine 3)
  modified_base 101: mod_base = OTHER; note = 3'DMT dC CPG (5'-Dimethoxytrityl-N-benzoyl-3'-deoxyCytosine, 2'-succinoyl-long chain alkylamino-CPG 500)
  source 1..101: mol_type = other DNA
aaagcttggtggaattccagtgggtgtgatagctgtggagactcagacgaccatgcaaactatccctgctgaccctggtcagcttgattcccgtgagcaat

SEQ ID NO: 200 - DNA, 101 bp, synthetic construct
  misc_feature 1..101: note = Synthetic
  modified_base 1: mod_base = OTHER; note = CY3 (Cyanine 3)
  modified_base 101: mod_base = OTHER; note = 3'DMT dC CPG (5'-Dimethoxytrityl-N-benzoyl-3'-deoxyCytosine, 2'-succinoyl-long chain alkylamino-CPG 500)
  source 1..101: mol_type = other DNA
aaagcttggtggaattccagtgggtgtgatagctgtggagactcagacgacaatgcaaactatccctgctgaccctggtcagcttgattcccgtgagcaat

SEQ ID NO: 201 - DNA, 101 bp, synthetic construct
  misc_feature 1..101: note = Synthetic
  modified_base 1: mod_base = OTHER; note = CY3 (Cyanine 3)
  modified_base 101: mod_base = OTHER; note = 3'DMT dC CPG (5'-Dimethoxytrityl-N-benzoyl-3'-deoxyCytosine, 2'-succinoyl-long chain alkylamino-CPG 500)
  source 1..101: mol_type = other DNA
aaagcttggtggaattccagtgggtgtgatagctgtggagactcagacgacgatgcaaactatccctgctgaccctggtcagcttgattcccgtgagcaat

SEQ ID NO: 202 - DNA, 101 bp, synthetic construct
  misc_feature 1..101: note = Synthetic
  modified_base 1: mod_base = OTHER; note = CY3 (Cyanine 3)
  modified_base 101: mod_base = OTHER; note = 3'DMT dC CPG (5'-Dimethoxytrityl-N-benzoyl-3'-deoxyCytosine, 2'-succinoyl-long chain alkylamino-CPG 500)
  source 1..101: mol_type = other DNA
aaagcttggtggaattccagtgggtgtgatagctgtcgagactcagaccactatgcaaactatccctgctgaccctggtcagcttgattcccgtgagcaat

SEQ ID NO: 203 - DNA, 101 bp, synthetic construct
  misc_feature 1..101: note = Synthetic
  modified_base 1: mod_base = OTHER; note = CY3 (Cyanine 3)
  modified_base 101: mod_base = OTHER; note = 3'DMT dC CPG (5'-Dimethoxytrityl-N-benzoyl-3'-deoxyCytosine, 2'-succinoyl-long chain alkylamino-CPG 500)
  source 1..101: mol_type = other DNA
aaagcttggtggaattccagtgggtgtgatagctgtcgagactcagaccaccatgcaaactatccctgctgaccctggtcagcttgattcccgtgagcaat

SEQ ID NO: 204 - DNA, 101 bp, synthetic construct
  misc_feature 1..101: note = Synthetic
  modified_base 1: mod_base = OTHER; note = CY3 (Cyanine 3)
  modified_base 101: mod_base = OTHER; note = 3'DMT dC CPG (5'-Dimethoxytrityl-N-benzoyl-3'-deoxyCytosine, 2'-succinoyl-long chain alkylamino-CPG 500)
  source 1..101: mol_type = other DNA
aaagcttggtggaattccagtgggtgtgatagctgtcgagactcagaccacaatgcaaactatccctgctgaccctggtcagcttgattcccgtgagcaat

SEQ ID NO: 205 - DNA, 101 bp, synthetic construct
  misc_feature 1..101: note = Synthetic
  modified_base 1: mod_base = OTHER; note = CY3 (Cyanine 3)
  modified_base 101: mod_base = OTHER; note = 3'DMT dC CPG (5'-Dimethoxytrityl-N-benzoyl-3'-deoxyCytosine, 2'-succinoyl-long chain alkylamino-CPG 500)
  source 1..101: mol_type = other DNA
aaagcttggtggaattccagtgggtgtgatagctgtcgagactcagaccacgatgcaaactatccctgctgaccctggtcagcttgattcccgtgagcaat

SEQ ID NO: 206 - DNA, 101 bp, synthetic construct
  misc_feature 1..101: note = Synthetic
  modified_base 1: mod_base = OTHER; note = CY3 (Cyanine 3)
  modified_base 101: mod_base = OTHER; note = 3'DMT dC CPG (5'-Dimethoxytrityl-N-benzoyl-3'-deoxyCytosine, 2'-succinoyl-long chain alkylamino-CPG 500)
  source 1..101: mol_type = other DNA
ttctgttgtgggcaaggaagatggacttggtgtggagaatatacatggaagtgctgctattgccagtgcttattctagggcatataaggagacatttacac

SEQ ID NO: 207 - DNA, 101 bp, synthetic construct
  misc_feature 1..101: note = Synthetic
  modified_base 1: mod_base = OTHER; note = CY3 (Cyanine 3)
  modified_base 101: mod_base = OTHER; note = 3'DMT dC CPG (5'-Dimethoxytrityl-N-benzoyl-3'-deoxyCytosine, 2'-succinoyl-long chain alkylamino-CPG 500)
  source 1..101: mol_type = other DNA
ttctgttgtgggcaaggaagatggacttggtgtggagaatatacatggaaatgctgctattgccagtgcttattctagggcatataaggagacatttacac

SEQ ID NO: 208 - DNA, 101 bp, synthetic construct
  misc_feature 1..101: note = Synthetic
  modified_base 1: mod_base = OTHER; note = CY3 (Cyanine 3)
  modified_base 101: mod_base = OTHER; note = 3'DMT dC CPG (5'-Dimethoxytrityl-N-benzoyl-3'-deoxyCytosine, 2'-succinoyl-long chain alkylamino-CPG 500)
  source 1..101: mol_type = other DNA
ttctgttgtgggcaaggaagatggacttggtgtggagaatatacatggaaacgctgctattgccagtgcttattctagggcatataaggagacatttacac

SEQ ID NO: 209 - DNA, 101 bp, synthetic construct
  misc_feature 1..101: note = Synthetic
  modified_base 1: mod_base = OTHER; note = CY3 (Cyanine 3)
  modified_base 101: mod_base = OTHER; note = 3'DMT dC CPG (5'-Dimethoxytrityl-N-benzoyl-3'-deoxyCytosine, 2'-succinoyl-long chain alkylamino-CPG 500)
  source 1..101: mol_type = other DNA
ttctgttgtgggcaaggaagatggacttggtgtggagaacattcatggaaatgctgctattgccagtgcttattctagggcatataaggagacatttacac

SEQ ID NO: 210 - DNA, 101 bp, synthetic construct
  misc_feature 1..101: note = Synthetic
  modified_base 1: mod_base = OTHER; note = CY3 (Cyanine 3)
  modified_base 101: mod_base = OTHER; note = 3'DMT dC CPG (5'-Dimethoxytrityl-N-benzoyl-3'-deoxyCytosine, 2'-succinoyl-long chain alkylamino-CPG 500)
  source 1..101: mol_type = other DNA
ttctgttgtgggcaaggaagatggacttggtgtggagaacattcatggaaacgctgctattgccagtgcttattctagggcatataaggagacatttacac

SEQ ID NO: 211 - DNA, 101 bp, synthetic construct
  misc_feature 1..101: note = Synthetic
  modified_base 1: mod_base = OTHER; note = CY3 (Cyanine 3)
  modified_base 101: mod_base = OTHER; note = 3'DMT dC CPG (5'-Dimethoxytrityl-N-benzoyl-3'-deoxyCytosine, 2'-succinoyl-long chain alkylamino-CPG 500)
  source 1..101: mol_type = other DNA
ttctgttgtgggcaaggaagatggacttggtgtggagaatatacatggaaatgctgctattgcgagtgcttattctagggcatataaggagacatttacac

SEQ ID NO: 212 - DNA, 101 bp, synthetic construct
  misc_feature 1..101: note = Synthetic
  modified_base 1: mod_base = OTHER; note = CY3 (Cyanine 3)
  modified_base 101: mod_base = OTHER; note = 3'DMT dC CPG (5'-Dimethoxytrityl-N-benzoyl-3'-deoxyCytosine, 2'-succinoyl-long chain alkylamino-CPG 500)
  source 1..101: mol_type = other DNA
ttctgttgtgggcaaggaagatggacttggtgtggagaatatacatggaaacgctgctattgcgagtgcttattctagggcatataaggagacatttacac

SEQ ID NO: 213 - DNA, 101 bp, synthetic construct
  misc_feature 1..101: note = Synthetic
  modified_base 1: mod_base = OTHER; note = CY3 (Cyanine 3)
  modified_base 101: mod_base = OTHER; note = 3'DMT dC CPG (5'-Dimethoxytrityl-N-benzoyl-3'-deoxyCytosine, 2'-succinoyl-long chain alkylamino-CPG 500)
  source 1..101: mol_type = other DNA
tacatttgtgactggaagaactgttggaataggagcttatcttgctcgacttggcatccggtgcatacagcgtcttgaccagcctattattcttacaggct

SEQ ID NO: 214 - DNA, 101 bp, synthetic construct
  misc_feature 1..101: note = Synthetic
  modified_base 1: mod_base = OTHER; note = CY3 (Cyanine 3)
  modified_base 101: mod_base = OTHER; note = 3'DMT dC CPG (5'-Dimethoxytrityl-N-benzoyl-3'-deoxyCytosine, 2'-succinoyl-long chain alkylamino-CPG 500)
  source 1..101: mol_type = other DNA
tacatttgtgactggaagaactgttggaataggagcttatcttgctcgacatggcatccggtgcatacagcgtcttgaccagcctattattcttacaggct

SEQ ID NO: 215 - DNA, 101 bp, synthetic construct
  misc_feature 1..101: note = Synthetic
  modified_base 1: mod_base = OTHER; note = CY3 (Cyanine 3)
  modified_base 101: mod_base = OTHER; note = 3'DMT dC CPG (5'-Dimethoxytrityl-N-benzoyl-3'-deoxyCytosine, 2'-succinoyl-long chain alkylamino-CPG 500)
  source 1..101: mol_type = other DNA
tacatttgtgactggaagaactgttggaataggagcttatcttgctcgacacggcatccggtgcatacagcgtcttgaccagcctattattcttacaggct

SEQ ID NO: 216 - DNA, 101 bp, synthetic construct
  misc_feature 1..101: note = Synthetic
  modified_base 1: mod_base = OTHER; note = CY3 (Cyanine 3)
  modified_base 101: mod_base = OTHER; note = 3'DMT dC CPG (5'-Dimethoxytrityl-N-benzoyl-3'-deoxyCytosine, 2'-succinoyl-long chain alkylamino-CPG 500)
  source 1..101: mol_type = other DNA
tacatttgtgactggaagaactgttggaataggagcttatcttgctcgtcatggcatccggtgcatacagcgtcttgaccagcctattattcttacaggct

SEQ ID NO: 217 - DNA, 101 bp, synthetic construct
  misc_feature 1..101: note = Synthetic
  modified_base 1: mod_base = OTHER; note = CY3 (Cyanine 3)
  modified_base 101: mod_base = OTHER; note = 3'DMT dC CPG (5'-Dimethoxytrityl-N-benzoyl-3'-deoxyCytosine, 2'-succinoyl-long chain alkylamino-CPG 500)
  source 1..101: mol_type = other DNA
tacatttgtgactggaagaactgttggaataggagcttatcttgctcgtcacggcatccggtgcatacagcgtcttgaccagcctattattcttacaggct

SEQ ID NO: 218 - DNA, 101 bp, synthetic construct
  misc_feature 1..101: note = Synthetic
  modified_base 1: mod_base = OTHER; note = CY3 (Cyanine 3)
  modified_base 101: mod_base = OTHER; note = 3'DMT dC CPG (5'-Dimethoxytrityl-N-benzoyl-3'-deoxyCytosine, 2'-succinoyl-long chain alkylamino-CPG 500)
  source 1..101: mol_type = other DNA
tacatttgtgactggaagaactgttggaataggagcttatcttgctcgacatggcatacggtgcatacagcgtcttgaccagcctattattcttacaggct

SEQ ID NO: 219 - DNA, 101 bp, synthetic construct
  misc_feature 1..101: note = Synthetic
  modified_base 1: mod_base = OTHER; note = CY3 (Cyanine 3)
  modified_base 101: mod_base = OTHER; note = 3'DMT dC CPG (5'-Dimethoxytrityl-N-benzoyl-3'-deoxyCytosine, 2'-succinoyl-long chain alkylamino-CPG 500)
  source 1..101: mol_type = other DNA
tacatttgtgactggaagaactgttggaataggagcttatcttgctcgacacggcatacggtgcatacagcgtcttgaccagcctattattcttacaggct

SEQ ID NO: 220 - DNA, 101 bp, synthetic construct
  misc_feature 1..101: note = Synthetic
  modified_base 1: mod_base = OTHER; note = CY3 (Cyanine 3)
  modified_base 101: mod_base = OTHER; note = 3'DMT dC CPG (5'-Dimethoxytrityl-N-benzoyl-3'-deoxyCytosine, 2'-succinoyl-long chain alkylamino-CPG 500)
  source 1..101: mol_type = other DNA
tacatttgtgactggaagaactgttggaataggagcttatcttgctcgacatggcatccgctgcatacagcgtcttgaccagcctattattcttacaggct

SEQ ID NO: 221 - DNA, 101 bp, synthetic construct
  misc_feature 1..101: note = Synthetic
  modified_base 1: mod_base = OTHER; note = CY3 (Cyanine 3)
  modified_base 101: mod_base = OTHER; note = 3'DMT dC CPG (5'-Dimethoxytrityl-N-benzoyl-3'-deoxyCytosine, 2'-succinoyl-long chain alkylamino-CPG 500)
  source 1..101: mol_type = other DNA
tacatttgtgactggaagaactgttggaataggagcttatcttgctcgacacggcatccgctgcatacagcgtcttgaccagcctattattcttacaggct

SEQ ID NO: 222 - DNA, 101 bp, synthetic construct
  misc_feature 1..101: note = Synthetic
  modified_base 1: mod_base = OTHER; note = CY3 (Cyanine 3)
  modified_base 101: mod_base = OTHER; note = 3'DMT dC CPG (5'-Dimethoxytrityl-N-benzoyl-3'-deoxyCytosine, 2'-succinoyl-long chain alkylamino-CPG 500)
  source 1..101: mol_type = other DNA
tgttgcaaatgatattacgttcagagctggatcatttggcccaagggaagatgcattttttgaagctgttaccaacctagcctgtgagaagaaacttcctc

SEQ ID NO: 223 - DNA, 101 bp, synthetic construct
  misc_feature 1..101: note = Synthetic
  modified_base 1: mod_base = OTHER; note = CY3 (Cyanine 3)
  modified_base 101: mod_base = OTHER; note = 3'DMT dC CPG (5'-Dimethoxytrityl-N-benzoyl-3'-deoxyCytosine, 2'-succinoyl-long chain alkylamino-CPG 500)
  source 1..101: mol_type = other DNA
tgttgcaaatgatattacgttcagagctggatcatttggcccaagggaagaagcattttttgaagctgttaccaacctagcctgtgagaagaaacttcctc

SEQ ID NO: 224 - DNA, 101 bp, synthetic construct
  misc_feature 1..101: note = Synthetic
  modified_base 1: mod_base = OTHER; note = CY3 (Cyanine 3)
  modified_base 101: mod_base = OTHER; note = 3'DMT dC CPG (5'-Dimethoxytrityl-N-benzoyl-3'-deoxyCytosine, 2'-succinoyl-long chain alkylamino-CPG 500)
  source 1..101: mol_type = other DNA
tgttgcaaatgatattacgttcagagctggatcatttggcccaagggaagaggcattttttgaagctgttaccaacctagcctgtgagaagaaacttcctc

SEQ ID NO: 225 - DNA, 101 bp, synthetic construct
  misc_feature 1..101: note = Synthetic
  modified_base 1: mod_base = OTHER; note = CY3 (Cyanine 3)
  modified_base 101: mod_base = OTHER; note = 3'DMT dC CPG (5'-Dimethoxytrityl-N-benzoyl-3'-deoxyCytosine, 2'-succinoyl-long chain alkylamino-CPG 500)
  source 1..101: mol_type = other DNA
tgttgcaaatgatattacgttcagagctggatcatttggcccaagggaaggagcattttttgaagctgttaccaacctagcctgtgagaagaaacttcctc

SEQ ID NO: 226 - DNA, 101 bp, synthetic construct
  misc_feature 1..101: note = Synthetic
  modified_base 1: mod_base = OTHER; note = CY3 (Cyanine 3)
  modified_base 101: mod_base = OTHER; note = 3'DMT dC CPG (5'-Dimethoxytrityl-N-benzoyl-3'-deoxyCytosine, 2'-succinoyl-long chain alkylamino-CPG 500)
  source 1..101: mol_type = other DNA
tgttgcaaatgatattacgttcagagctggatcatttggcccaagggaaggtgcattttttgaagctgttaccaacctagcctgtgagaagaaacttcctc

SEQ ID NO: 227 - DNA, 101 bp, synthetic construct
  misc_feature 1..101: note = Synthetic
  modified_base 1: mod_base = OTHER; note = CY3 (Cyanine 3)
  modified_base 101: mod_base = OTHER; note = 3'DMT dC CPG (5'-Dimethoxytrityl-N-benzoyl-3'-deoxyCytosine, 2'-succinoyl-long chain alkylamino-CPG 500)
  source 1..101: mol_type = other DNA
tgttgcaaatgatattacgttcagagctggatcatttggcccaagggaaggcgcattttttgaagctgttaccaacctagcctgtgagaagaaacttcctc

SEQ ID NO: 228 - DNA, 101 bp, synthetic construct
  misc_feature 1..101: note = Synthetic
  modified_base 1: mod_base = OTHER; note = CY3 (Cyanine 3)
  modified_base 101: mod_base = OTHER; note = 3'DMT dC CPG (5'-Dimethoxytrityl-N-benzoyl-3'-deoxyCytosine, 2'-succinoyl-long chain alkylamino-CPG 500)
  source 1..101: mol_type = other DNA
tgttgcaaatgatattacgttcagagctggatcatttggcccaagggaaggggcattttttgaagctgttaccaacctagcctgtgagaagaaacttcctc

SEQ ID NO: 229 - DNA, 101 bp, synthetic construct
  misc_feature 1..101: note = Synthetic
  modified_base 1: mod_base = OTHER; note = CY3 (Cyanine 3)
  modified_base 101: mod_base = OTHER; note = 3'DMT dC CPG (5'-Dimethoxytrityl-N-benzoyl-3'-deoxyCytosine, 2'-succinoyl-long chain alkylamino-CPG 500)
  source 1..101: mol_type = other DNA
tgttgcaaatgatattacgttcagagctggatcatttggcccaagagaagaagcattttttgaagctgttaccaacctagcctgtgagaagaaacttcctc

SEQ ID NO: 230 - DNA, 101 bp, synthetic construct
  misc_feature 1..101: note = Synthetic
  modified_base 1: mod_base = OTHER; note = CY3 (Cyanine 3)
  modified_base 101: mod_base = OTHER; note = 3'DMT dC CPG (5'-Dimethoxytrityl-N-benzoyl-3'-deoxyCytosine, 2'-succinoyl-long chain alkylamino-CPG 500)
  source 1..101: mol_type = other DNA
tgttgcaaatgatattacgttcagagctggatcatttggcccaagagaagaggcattttttgaagctgttaccaacctagcctgtgagaagaaacttcctc

SEQ ID NO: 231 - DNA, 101 bp, synthetic construct
  misc_feature 1..101: note = Synthetic
  modified_base 1: mod_base = OTHER; note = CY3 (Cyanine 3)
  modified_base 101: mod_base = OTHER; note = 3'DMT dC CPG (5'-Dimethoxytrityl-N-benzoyl-3'-deoxyCytosine, 2'-succinoyl-long chain alkylamino-CPG 500)
  source 1..101: mol_type = other DNA
tgttgcaaatgatattacgttcagagctggatcatttggcccaagagaaggagcattttttgaagctgttaccaacctagcctgtgagaagaaacttcctc

SEQ ID NO: 232 - DNA, 101 bp, synthetic construct
  misc_feature 1..101: note = Synthetic
  modified_base 1: mod_base = OTHER; note = CY3 (Cyanine 3)
  modified_base 101: mod_base = OTHER; note = 3'DMT dC CPG (5'-Dimethoxytrityl-N-benzoyl-3'-deoxyCytosine, 2'-succinoyl-long chain alkylamino-CPG 500)
  source 1..101: mol_type = other DNA
tgttgcaaatgatattacgttcagagctggatcatttggcccaagagaaggtgcattttttgaagctgttaccaacctagcctgtgagaagaaacttcctc

SEQ ID NO: 233 - DNA, 101 bp, synthetic construct
  misc_feature 1..101: note = Synthetic
  modified_base 1: mod_base = OTHER; note = CY3 (Cyanine 3)
  modified_base 101: mod_base = OTHER; note = 3'DMT dC CPG (5'-Dimethoxytrityl-N-benzoyl-3'-deoxyCytosine, 2'-succinoyl-long chain alkylamino-CPG 500)
  source 1..101: mol_type = other DNA
tgttgcaaatgatattacgttcagagctggatcatttggcccaagagaaggcgcattttttgaagctgttaccaacctagcctgtgagaagaaacttcctc

SEQ ID NO: 234 - DNA, 101 bp, synthetic construct
  misc_feature 1..101: note = Synthetic
  modified_base 1: mod_base = OTHER; note = CY3 (Cyanine 3)
  modified_base 101: mod_base = OTHER; note = 3'DMT dC CPG (5'-Dimethoxytrityl-N-benzoyl-3'-deoxyCytosine, 2'-succinoyl-long chain alkylamino-CPG 500)
  source 1..101: mol_type = other DNA
tgttgcaaatgatattacgttcagagctggatcatttggcccaagagaaggggcattttttgaagctgttaccaacctagcctgtgagaagaaacttcctc

SEQ ID NO: 235 - DNA, 101 bp, synthetic construct
  misc_feature 1..101: note = Synthetic
  modified_base 1: mod_base = OTHER; note = CY3 (Cyanine 3)
  modified_base 101: mod_base = OTHER; note = 3'DMT dC CPG (5'-Dimethoxytrityl-N-benzoyl-3'-deoxyCytosine, 2'-succinoyl-long chain alkylamino-CPG 500)
  source 1..101: mol_type = other DNA
tgttgcaaatgatattacgttcagagctggatcatttggccctagggaagaagcattttttgaagctgttaccaacctagcctgtgagaagaaacttcctc

SEQ ID NO: 236 - DNA, 101 bp, synthetic construct
  misc_feature 1..101: note = Synthetic
  modified_base 1: mod_base = OTHER; note = CY3 (Cyanine 3)
  modified_base 101: mod_base = OTHER; note = 3'DMT dC CPG (5'-Dimethoxytrityl-N-benzoyl-3'-deoxyCytosine, 2'-succinoyl-long chain alkylamino-CPG 500)
  source 1..101: mol_type = other DNA
tgttgcaaatgatattacgttcagagctggatcatttggccctagggaagaggcattttttgaagctgttaccaacctagcctgtgagaagaaacttcctc

SEQ ID NO: 237 - DNA, 101 bp, synthetic construct
  misc_feature 1..101: note = Synthetic
  modified_base 1: mod_base = OTHER; note = CY3 (Cyanine 3)
  modified_base 101: mod_base = OTHER; note = 3'DMT dC CPG (5'-Dimethoxytrityl-N-benzoyl-3'-deoxyCytosine, 2'-succinoyl-long chain alkylamino-CPG 500)
  source 1..101: mol_type = other DNA
tgttgcaaatgatattacgttcagagctggatcatttggccctagggaaggagcattttttgaagctgttaccaacctagcctgtgagaagaaacttcctc

SEQ ID NO: 238 - DNA, 101 bp, synthetic construct
  misc_feature 1..101: note = Synthetic
  modified_base 1: mod_base = OTHER; note = CY3 (Cyanine 3)
  modified_base 101: mod_base = OTHER; note = 3'DMT dC CPG (5'-Dimethoxytrityl-N-benzoyl-3'-deoxyCytosine, 2'-succinoyl-long chain alkylamino-CPG 500)
  source 1..101: mol_type = other DNA
tgttgcaaatgatattacgttcagagctggatcatttggccctagggaaggtgcattttttgaagctgttaccaacctagcctgtgagaagaaacttcctc

SEQ ID NO: 239 - DNA, 101 bp, synthetic construct
  misc_feature 1..101: note = Synthetic
  modified_base 1: mod_base = OTHER; note = CY3 (Cyanine 3)
  modified_base 101: mod_base = OTHER; note = 3'DMT dC CPG (5'-Dimethoxytrityl-N-benzoyl-3'-deoxyCytosine, 2'-succinoyl-long chain alkylamino-CPG 500)
  source 1..101: mol_type = other DNA
tgttgcaaatgatattacgttcagagctggatcatttggccctagggaaggcgcattttttgaagctgttaccaacctagcctgtgagaagaaacttcctc

SEQ ID NO: 240 - DNA, 101 bp, synthetic construct
  misc_feature 1..101: note = Synthetic
  modified_base 1: mod_base = OTHER; note = CY3 (Cyanine 3)
  modified_base 101: mod_base = OTHER; note = 3'DMT dC CPG (5'-Dimethoxytrityl-N-benzoyl-3'-deoxyCytosine, 2'-succinoyl-long chain alkylamino-CPG 500)
  source 1..101: mol_type = other DNA
tgttgcaaatgatattacgttcagagctggatcatttggccctagggaaggggcattttttgaagctgttaccaacctagcctgtgagaagaaacttcctc

SEQ ID NO: 241 - DNA, 99 bp, synthetic construct
  misc_feature 1..99: note = Synthetic
  modified_base 1: mod_base = OTHER; note = CY3 (Cyanine 3)
  modified_base 99: mod_base = OTHER; note = 3'DMT dC CPG (5'-Dimethoxytrityl-N-benzoyl-3'-deoxyCytosine, 2'-succinoyl-long chain alkylamino-CPG 500)
  source 1..99: mol_type = other DNA
tgccacaccatgcagaggaccagccgccggagtggcgggatggtatactaacttccgtgattctttatcttccatctcacggtagatatccacagtgca

SEQ ID NO: 242 - DNA, 99 bp, synthetic construct
  misc_feature 1..99: note = Synthetic
  modified_base 1: mod_base = OTHER; note = CY3 (Cyanine 3)
  modified_base 99: mod_base = OTHER; note = 3'DMT dC CPG (5'-Dimethoxytrityl-N-benzoyl-3'-deoxyCytosine, 2'-succinoyl-long chain alkylamino-CPG 500)
  source 1..99: mol_type = other DNA
tgccacaccatgcagaggaccagccgccggagtggcgggatggtatacaaccttccgtgattctttatcttccatctcacggtagatatccacagtgca

SEQ ID NO: 243 - DNA, 99 bp, synthetic construct
  misc_feature 1..99: note = Synthetic
  modified_base 1: mod_base = OTHER; note = CY3 (Cyanine 3)
  modified_base 99: mod_base = OTHER; note = 3'DMT dC CPG (5'-Dimethoxytrityl-N-benzoyl-3'-deoxyCytosine, 2'-succinoyl-long chain alkylamino-CPG 500)
  source 1..99: mol_type = other DNA
tgccacaccatgcagaggaccagccgccggagtggcgggatggtatacgaccttccgtgattctttatcttccatctcacggtagatatccacagtgca

SEQ ID NO: 244 - DNA, 99 bp, synthetic construct
  misc_feature 1..99: note = Synthetic
  modified_base 1: mod_base = OTHER; note = CY3 (Cyanine 3)
  modified_base 99: mod_base = OTHER; note = 3'DMT dC CPG (5'-Dimethoxytrityl-N-benzoyl-3'-deoxyCytosine, 2'-succinoyl-long chain alkylamino-CPG 500)
  source 1..99: mol_type = other DNA
tgccacaccatgcagaggaccagccgccggagtggcgggatggtatactaccttccgtgattctttatcttccatctcacggtagatatccacagtgca

SEQ ID NO: 245 - DNA, 99 bp, synthetic construct
  misc_feature 1..99: note = Synthetic
  modified_base 1: mod_base = OTHER; note = CY3 (Cyanine 3)
  modified_base 99: mod_base = OTHER; note = 3'DMT dC CPG (5'-Dimethoxytrityl-N-benzoyl-3'-deoxyCytosine, 2'-succinoyl-long chain alkylamino-CPG 500)
  source 1..99: mol_type = other DNA
tgccacaccatgcagaggaccagccgccggagtggcgggatggtataccaccttccgtgattctttatcttccatctcacggtagatatccacagtgca

SEQ ID NO: 246 - DNA, 99 bp, synthetic construct
  misc_feature 1..99: note = Synthetic
  modified_base 1: mod_base = OTHER; note = CY3 (Cyanine 3)
  modified_base 99: mod_base = OTHER; note = 3'DMT dC CPG (5'-Dimethoxytrityl-N-benzoyl-3'-deoxyCytosine, 2'-succinoyl-long chain alkylamino-CPG 500)
  source 1..99: mol_type = other DNA
tgccacaccatgcagaggaccagccgccggagtggcgggatggtatacaaacttccgtgattctttatcttccatctcacggtagatatccacagtgca

SEQ ID NO: 247 - DNA, 99 bp, synthetic construct
  misc_feature 1..99: note = Synthetic
  modified_base 1: mod_base = OTHER; note = CY3 (Cyanine 3)
  modified_base 99: mod_base = OTHER; note = 3'DMT dC CPG (5'-Dimethoxytrityl-N-benzoyl-3'-deoxyCytosine, 2'-succinoyl-long chain alkylamino-CPG 500)
  source 1..99: mol_type = other DNA
tgccacaccatgcagaggaccagccgccggagtggcgggatggtatacgaacttccgtgattctttatcttccatctcacggtagatatccacagtgca

SEQ ID NO: 248 - DNA, 99 bp, synthetic construct
  misc_feature 1..99: note = Synthetic
  modified_base 1: mod_base = OTHER; note = CY3 (Cyanine 3)
  modified_base 99: mod_base = OTHER; note = 3'DMT dC CPG (5'-Dimethoxytrityl-N-benzoyl-3'-deoxyCytosine, 2'-succinoyl-long chain alkylamino-CPG 500)
  source 1..99: mol_type = other DNA
tgccacaccatgcagaggaccagccgccggagtggcgggatggtatacaaccttgcgtgattctttatcttccatctcacggtagatatccacagtgca

SEQ ID NO: 249 - DNA, 99 bp, synthetic construct
  misc_feature 1..99: note = Synthetic
  modified_base 1: mod_base = OTHER; note = CY3 (Cyanine 3)
  modified_base 99: mod_base = OTHER; note = 3'DMT dC CPG (5'-Dimethoxytrityl-N-benzoyl-3'-deoxyCytosine, 2'-succinoyl-long chain alkylamino-CPG 500)
  source 1..99: mol_type = other DNA
tgccacaccatgcagaggaccagccgccggagtggcgggatggtatacgaccttgcgtgattctttatcttccatctcacggtagatatccacagtgca

SEQ ID NO: 250 - DNA, 99 bp, synthetic construct
  misc_feature 1..99: note = Synthetic
  modified_base 1: mod_base = OTHER; note = CY3 (Cyanine 3)
  modified_base 99: mod_base = OTHER; note = 3'DMT dC CPG (5'-Dimethoxytrityl-N-benzoyl-3'-deoxyCytosine, 2'-succinoyl-long chain alkylamino-CPG 500)
  source 1..99: mol_type = other DNA
tgccacaccatgcagaggaccagccgccggagtggcgggatggtatactaccttgcgtgattctttatcttccatctcacggtagatatccacagtgca

SEQ ID NO: 251 - DNA, 99 bp, synthetic construct
  misc_feature 1..99: note = Synthetic
  modified_base 1: mod_base = OTHER; note = CY3 (Cyanine 3)
  modified_base 99: mod_base = OTHER; note = 3'DMT dC CPG (5'-Dimethoxytrityl-N-benzoyl-3'-deoxyCytosine, 2'-succinoyl-long chain alkylamino-CPG 500)
  source 1..99: mol_type = other DNA
tgccacaccatgcagaggaccagccgccggagtggcgggatggtataccaccttgcgtgattctttatcttccatctcacggtagatatccacagtgca

SEQ ID NO: 252 - DNA, 99 bp, synthetic construct
  misc_feature 1..99: note = Synthetic
  modified_base 1: mod_base = OTHER; note = CY3 (Cyanine 3)
  modified_base 99: mod_base = OTHER; note = 3'DMT dC CPG (5'-Dimethoxytrityl-N-benzoyl-3'-deoxyCytosine, 2'-succinoyl-long chain alkylamino-CPG 500)
  source 1..99: mol_type = other DNA
tgccacaccatgcagaggaccagccgccggagtggcgggatggtatacaaacttgcgtgattctttatcttccatctcacggtagatatccacagtgca

SEQ ID NO: 253 - DNA, 99 bp, synthetic construct
  misc_feature 1..99: note = Synthetic
  modified_base 1: mod_base = OTHER; note = CY3 (Cyanine 3)
  modified_base 99: mod_base = OTHER; note = 3'DMT dC CPG (5'-Dimethoxytrityl-N-benzoyl-3'-deoxyCytosine, 2'-succinoyl-long chain alkylamino-CPG 500)
  source 1..99: mol_type = other DNA
tgccacaccatgcagaggaccagccgccggagtggcgggatggtatacgaacttgcgtgattctttatcttccatctcacggtagatatccacagtgca

SEQ ID NO: 254 - DNA, 99 bp, synthetic construct
  misc_feature 1..99: note = Synthetic
  modified_base 1: mod_base = OTHER; note = CY3 (Cyanine 3)
  modified_base 99: mod_base = OTHER; note = 3'DMT dC CPG (5'-Dimethoxytrityl-N-benzoyl-3'-deoxyCytosine, 2'-succinoyl-long chain alkylamino-CPG 500)
  source 1..99: mol_type = other DNA
tgccacaccatgcagaggaccagccgccggagtggcgggatgatatacaaccttccgtgattctttatcttccatctcacggtagatatccacagtgca

SEQ ID NO: 255 - DNA, 99 bp, synthetic construct
  misc_feature 1..99: note = Synthetic
  modified_base 1: mod_base = OTHER; note = CY3 (Cyanine 3)
  modified_base 99: mod_base = OTHER; note = 3'DMT dC CPG (5'-Dimethoxytrityl-N-benzoyl-3'-deoxyCytosine, 2'-succinoyl-long chain alkylamino-CPG 500)
  source 1..99: mol_type = other DNA
tgccacaccatgcagaggaccagccgccggagtggcgggatgatatacgaccttccgtgattctttatcttccatctcacggtagatatccacagtgca

SEQ ID NO: 256 - DNA, 99 bp, synthetic construct
  misc_feature 1..99: note = Synthetic
  modified_base 1: mod_base = OTHER; note = CY3 (Cyanine 3)
  modified_base 99: mod_base = OTHER; note = 3'DMT dC CPG (5'-Dimethoxytrityl-N-benzoyl-3'-deoxyCytosine, 2'-succinoyl-long chain alkylamino-CPG 500)
  source 1..99: mol_type = other DNA
tgccacaccatgcagaggaccagccgccggagtggcgggatgatatactaccttccgtgattctttatcttccatctcacggtagatatccacagtgca

SEQ ID NO: 257 - DNA, 99 bp, synthetic construct
  misc_feature 1..99: note = Synthetic
  modified_base 1: mod_base = OTHER; note = CY3 (Cyanine 3)
  modified_base 99: mod_base = OTHER; note = 3'DMT dC CPG (5'-Dimethoxytrityl-N-benzoyl-3'-deoxyCytosine, 2'-succinoyl-long chain alkylamino-CPG 500)
  source 1..99: mol_type = other DNA
tgccacaccatgcagaggaccagccgccggagtggcgggatgatataccaccttccgtgattctttatcttccatctcacggtagatatccacagtgca

SEQ ID NO: 258 - DNA, 99 bp, synthetic construct
  misc_feature 1..99: note = Synthetic
  modified_base 1: mod_base = OTHER; note = CY3 (Cyanine 3)
  modified_base 99: mod_base = OTHER; note = 3'DMT dC CPG (5'-Dimethoxytrityl-N-benzoyl-3'-deoxyCytosine, 2'-succinoyl-long chain alkylamino-CPG 500)
  source 1..99: mol_type = other DNA
tgccacaccatgcagaggaccagccgccggagtggcgggatgatatacaaacttccgtgattctttatcttccatctcacggtagatatccacagtgca

SEQ ID NO: 259 - DNA, 99 bp, synthetic construct
  misc_feature 1..99: note = Synthetic
  modified_base 1: mod_base = OTHER; note = CY3 (Cyanine 3)
  modified_base 99: mod_base = OTHER; note = 3'DMT dC CPG (5'-Dimethoxytrityl-N-benzoyl-3'-deoxyCytosine, 2'-succinoyl-long chain alkylamino-CPG 500)
  source 1..99: mol_type = other DNA
tgccacaccatgcagaggaccagccgccggagtggcgggatgatatacgaacttccgtgattctttatcttccatctcacggtagatatccacagtgca

SEQ ID NO: 260 - DNA, 99 bp, synthetic construct
  misc_feature 1..99: note = Synthetic
  modified_base 1: mod_base = OTHER; note = CY3 (Cyanine 3)
  modified_base 99: mod_base = OTHER; note = 3'DMT dC CPG (5'-Dimethoxytrityl-N-benzoyl-3'-deoxyCytosine, 2'-succinoyl-long chain alkylamino-CPG 500)
  source 1..99: mol_type = other DNA
ggtaacagcttcaaaaaatgcatcttcccttgggccaaatgatccagctctgaacgtaatatcatttgcaacaacaataatctccctaccactaggaaa

SEQ ID NO: 261 - DNA, 99 bp, synthetic construct
  misc_feature 1..99: note = Synthetic
  modified_base 1: mod_base = OTHER; note = CY3 (Cyanine 3)
  modified_base 99: mod_base = OTHER; note = 3'DMT dC CPG (5'-Dimethoxytrityl-N-benzoyl-3'-deoxyCytosine, 2'-succinoyl-long chain alkylamino-CPG 500)
  source 1..99: mol_type = other DNA
ggtaacagcttcaaaaaatgcatcttcccttgggccaaatgatccagcaatgaacgtaatatcatttgcaacaacaataatctccctaccactaggaaa

SEQ ID NO: 262 - DNA, 99 bp, synthetic construct
  misc_feature 1..99: note = Synthetic
  modified_base 1: mod_base = OTHER; note = CY3 (Cyanine 3)
  modified_base 99: mod_base = OTHER; note = 3'DMT dC CPG (5'-Dimethoxytrityl-N-benzoyl-3'-deoxyCytosine, 2'-succinoyl-long chain alkylamino-CPG 500)
  source 1..99: mol_type = other DNA
ggtaacagcttcaaaaaatgcatcttcccttgggccaaatgatccagcgatgaacgtaatatcatttgcaacaacaataatctccctaccactaggaaa

SEQ ID NO: 263 - DNA, 99 bp, synthetic construct
  misc_feature 1..99: note = Synthetic
  modified_base 1: mod_base = OTHER; note = CY3 (Cyanine 3)
  modified_base 99: mod_base = OTHER; note = 3'DMT dC CPG (5'-Dimethoxytrityl-N-benzoyl-3'-deoxyCytosine, 2'-succinoyl-long chain alkylamino-CPG 500)
  source 1..99: mol_type = other DNA
ggtaacagcttcaaaaaatgcatcttcccttgggccaaatgatccagctatgaacgtaatatcatttgcaacaacaataatctccctaccactaggaaa

SEQ ID NO: 264 - DNA, 99 bp, synthetic construct
  misc_feature 1..99: note = Synthetic
  modified_base 1: mod_base = OTHER; note = CY3 (Cyanine 3)
  modified_base 99: mod_base = OTHER; note = 3'DMT dC CPG (5'-Dimethoxytrityl-N-benzoyl-3'-deoxyCytosine, 2'-succinoyl-long chain alkylamino-CPG 500)
  source 1..99: mol_type = other DNA
ggtaacagcttcaaaaaatgcatcttcccttgggccgaaagaaccagcaatgaacgtaatatcatttgcaacaacaataatctccctaccactaggaaa

SEQ ID NO: 265 - DNA, 99 bp, synthetic construct
  misc_feature 1..99: note = Synthetic
  modified_base 1: mod_base = OTHER; note = CY3 (Cyanine 3)
  modified_base 99: mod_base = OTHER; note = 3'DMT dC CPG (5'-Dimethoxytrityl-N-benzoyl-3'-deoxyCytosine, 2'-succinoyl-long chain alkylamino-CPG 500)
  source 1..99: mol_type = other DNA
ggtaacagcttcaaaaaatgcatcttcccttgggccgaaagaaccagcgatgaacgtaatatcatttgcaacaacaataatctccctaccactaggaaa

SEQ ID NO: 266 - DNA, 99 bp, synthetic construct
  misc_feature 1..99: note = Synthetic
  modified_base 1: mod_base = OTHER; note = CY3 (Cyanine 3)
  modified_base 99: mod_base = OTHER; note = 3'DMT dC CPG (5'-Dimethoxytrityl-N-benzoyl-3'-deoxyCytosine, 2'-succinoyl-long chain alkylamino-CPG 500)
  source 1..99: mol_type = other DNA
ggtaacagcttcaaaaaatgcatcttcccttgggccgaaagaaccagctatgaacgtaatatcatttgcaacaacaataatctccctaccactaggaaa

SEQ ID NO: 267 - DNA, 101 bp, synthetic construct
  misc_feature 1..101: note = Synthetic
  modified_base 1: mod_base = OTHER; note = CY3 (Cyanine 3)
  modified_base 101: mod_base = OTHER; note = 3'DMT dC CPG (5'-Dimethoxytrityl-N-benzoyl-3'-deoxyCytosine, 2'-succinoyl-long chain alkylamino-CPG 500)
  source 1..101: mol_type = other DNA
attgctcacgggaatcaagctgaccagggtcagcagggatagtttgcatcatggtctgagtctccacagctatcacacccactggaattccaccaagcttt

SEQ ID NO: 268 - DNA, 101 bp, synthetic construct
  misc_feature 1..101: note = Synthetic
  modified_base 1: mod_base = OTHER; note = CY3 (Cyanine 3)
  modified_base 101: mod_base = OTHER; note = 3'DMT dC CPG (5'-Dimethoxytrityl-N-benzoyl-3'-deoxyCytosine, 2'-succinoyl-long chain alkylamino-CPG 500)
  source 1..101: mol_type = other DNA
attgctcacgggaatcaagctgaccagggtcagcagggatagtttgcatagtggtctgagtctccacagctatcacacccactggaattccaccaagcttt

SEQ ID NO: 269 - DNA, 101 bp, synthetic construct
  misc_feature 1..101: note = Synthetic
  modified_base 1: mod_base = OTHER; note = CY3 (Cyanine 3)
  modified_base 101: mod_base = OTHER; note = 3'DMT dC CPG (5'-Dimethoxytrityl-N-benzoyl-3'-deoxyCytosine, 2'-succinoyl-long chain alkylamino-CPG 500)
  source 1..101: mol_type = other DNA
attgctcacgggaatcaagctgaccagggtcagcagggatagtttgcatggtggtctgagtctccacagctatcacacccactggaattccaccaagcttt

SEQ ID NO: 270 - DNA, 101 bp, synthetic construct
  misc_feature 1..101: note = Synthetic
  modified_base 1: mod_base = OTHER; note = CY3 (Cyanine 3)
  modified_base 101: mod_base = OTHER; note = 3'DMT dC CPG (5'-Dimethoxytrityl-N-benzoyl-3'-deoxyCytosine, 2'-succinoyl-long chain alkylamino-CPG 500)
  source 1..101: mol_type = other DNA
attgctcacgggaatcaagctgaccagggtcagcagggatagtttgcattgtggtctgagtctccacagctatcacacccactggaattccaccaagcttt

SEQ ID NO: 271 - DNA, 101 bp, synthetic construct
  misc_feature 1..101: note = Synthetic
  modified_base 1: mod_base = OTHER; note = CY3 (Cyanine 3)
  modified_base 101: mod_base = OTHER; note = 3'DMT dC CPG (5'-Dimethoxytrityl-N-benzoyl-3'-deoxyCytosine, 2'-succinoyl-long chain alkylamino-CPG 500)
  source 1..101: mol_type = other DNA
attgctcacgggaatcaagctgaccagggtcagcagggatagtttgcatcgtggtctgagtctccacagctatcacacccactggaattccaccaagcttt

SEQ ID NO: 272 - DNA, 101 bp, synthetic construct
  misc_feature 1..101: note = Synthetic
  modified_base 1: mod_base = OTHER; note = CY3 (Cyanine 3)
  modified_base 101: mod_base = OTHER; note = 3'DMT dC CPG (5'-Dimethoxytrityl-N-benzoyl-3'-deoxyCytosine, 2'-succinoyl-long chain alkylamino-CPG 500)
  source 1..101: mol_type = other DNA
attgctcacgggaatcaagctgaccagggtcagcagggatagtttgcatagtcgtctgagtctccacagctatcacacccactggaattccaccaagcttt

SEQ ID NO: 273 - DNA, 101 bp, synthetic construct
  misc_feature 1..101: note = Synthetic
  modified_base 1: mod_base = OTHER; note = CY3 (Cyanine 3)
  modified_base 101: mod_base = OTHER; note = 3'DMT dC CPG (5'-Dimethoxytrityl-N-benzoyl-3'-deoxyCytosine, 2'-succinoyl-long chain alkylamino-CPG 500)
  source 1..101: mol_type = other DNA
attgctcacgggaatcaagctgaccagggtcagcagggatagtttgcatggtcgtctgagtctccacagctatcacacccactggaattccaccaagcttt

SEQ ID NO: 274 - DNA, 101 bp, synthetic construct
  misc_feature 1..101: note = Synthetic
  modified_base 1: mod_base = OTHER; note = CY3 (Cyanine 3)
  modified_base 101: mod_base = OTHER; note = 3'DMT dC CPG (5'-Dimethoxytrityl-N-benzoyl-3'-deoxyCytosine, 2'-succinoyl-long chain alkylamino-CPG 500)
  source 1..101: mol_type = other DNA
attgctcacgggaatcaagctgaccagggtcagcagggatagtttgcattgtcgtctgagtctccacagctatcacacccactggaattccaccaagcttt

SEQ ID NO: 275 - DNA, 101 bp, synthetic construct
  misc_feature 1..101: note = Synthetic
  modified_base 1: mod_base = OTHER; note = CY3 (Cyanine 3)
  modified_base 101: mod_base = OTHER; note = 3'DMT dC CPG (5'-Dimethoxytrityl-N-benzoyl-3'-deoxyCytosine, 2'-succinoyl-long chain alkylamino-CPG 500)
  source 1..101: mol_type = other DNA
attgctcacgggaatcaagctgaccagggtcagcagggatagtttgcatcgtcgtctgagtctccacagctatcacacccactggaattccaccaagcttt

SEQ ID NO: 276 - DNA, 101 bp, synthetic construct
  misc_feature 1..101: note = Synthetic
  modified_base 1: mod_base = OTHER; note = CY3 (Cyanine 3)
  modified_base 101: mod_base = OTHER; note = 3'DMT dC CPG (5'-Dimethoxytrityl-N-benzoyl-3'-deoxyCytosine, 2'-succinoyl-long chain alkylamino-CPG 500)
  source 1..101: mol_type = other DNA
attgctcacgggaatcaagctgaccagggtcagcagggatagtttgcatagtggtctgagtctcgacagctatcacacccactggaattccaccaagcttt

SEQ ID NO: 277 - DNA, 101 bp, synthetic construct
  misc_feature 1..101: note = Synthetic
  modified_base 1: mod_base = OTHER; note = CY3 (Cyanine 3)
  modified_base 101: mod_base = OTHER; note = 3'DMT dC CPG (5'-Dimethoxytrityl-N-benzoyl-3'-deoxyCytosine, 2'-succinoyl-long chain alkylamino-CPG 500)
  source 1..101: mol_type = other DNA
attgctcacgggaatcaagctgaccagggtcagcagggatagtttgcatggtggtctgagtctcgacagctatcacacccactggaattccaccaagcttt

SEQ ID NO: 278 - DNA, 101 bp, synthetic construct
  misc_feature 1..101: note = Synthetic
  modified_base 1: mod_base = OTHER; note = CY3 (Cyanine 3)
  modified_base 101: mod_base = OTHER; note = 3'DMT dC CPG (5'-Dimethoxytrityl-N-benzoyl-3'-deoxyCytosine, 2'-succinoyl-long chain alkylamino-CPG 500)
  source 1..101: mol_type = other DNA
attgctcacgggaatcaagctgaccagggtcagcagggatagtttgcattgtggtctgagtctcgacagctatcacacccactggaattccaccaagcttt

SEQ ID NO: 279 - DNA, 101 bp, synthetic construct
  misc_feature 1..101: note = Synthetic
  modified_base 1: mod_base = OTHER; note = CY3 (Cyanine 3)
  modified_base 101: mod_base = OTHER; note = 3'DMT dC CPG (5'-Dimethoxytrityl-N-benzoyl-3'-deoxyCytosine, 2'-succinoyl-long chain alkylamino-CPG 500)
  source 1..101: mol_type = other DNA
attgctcacgggaatcaagctgaccagggtcagcagggatagtttgcatcgtggtctgagtctcgacagctatcacacccactggaattccaccaagcttt

SEQ ID NO: 280 - DNA, 101 bp, synthetic construct
  misc_feature 1..101: note = Synthetic
  modified_base 1: mod_base = OTHER; note = CY3 (Cyanine 3)
  modified_base 101: mod_base = OTHER; note = 3'DMT dC CPG (5'-Dimethoxytrityl-N-benzoyl-3'-deoxyCytosine, 2'-succinoyl-long chain alkylamino-CPG 500)
  source 1..101: mol_type = other DNA
gtgtaaatgtctccttatatgccctagaataagcactggcaatagcagcacttccatgtatattctccacaccaagtccatcttccttgcccacaacagaa

SEQ ID NO: 281 - DNA, 101 bp, synthetic construct
  misc_feature 1..101: note = Synthetic
  modified_base 1: mod_base = OTHER; note = CY3 (Cyanine 3)
  modified_base 101: mod_base = OTHER; note = 3'DMT dC CPG (5'-Dimethoxytrityl-N-benzoyl-3'-deoxyCytosine, 2'-succinoyl-long chain alkylamino-CPG 500)
  source 1..101: mol_type = other DNA
gtgtaaatgtctccttatatgccctagaataagcactggcaatagcagcatttccatgtatattctccacaccaagtccatcttccttgcccacaacagaa

SEQ ID NO: 282 - DNA, 101 bp, synthetic construct
  misc_feature 1..101: note = Synthetic
  modified_base 1: mod_base = OTHER; note = CY3 (Cyanine 3)
  modified_base 101: mod_base = OTHER; note = 3'DMT dC CPG (5'-Dimethoxytrityl-N-benzoyl-3'-deoxyCytosine, 2'-succinoyl-long chain alkylamino-CPG 500)
  source 1..101: mol_type = other DNA
gtgtaaatgtctccttatatgccctagaataagcactggcaatagcagcgtttccatgtatattctccacaccaagtccatcttccttgcccacaacagaa

SEQ ID NO: 283 - DNA, 101 bp, synthetic construct
  misc_feature 1..101: note = Synthetic
  modified_base 1: mod_base = OTHER; note = CY3 (Cyanine 3)
  modified_base 101: mod_base = OTHER; note = 3'DMT dC CPG (5'-Dimethoxytrityl-N-benzoyl-3'-deoxyCytosine, 2'-succinoyl-long chain alkylamino-CPG 500)
  source 1..101: mol_type = other DNA
gtgtaaatgtctccttatatgccctagaataagcactggcaatagcagcatttccatgaatgttctccacaccaagtccatcttccttgcccacaacagaa

SEQ ID NO: 284 - DNA, 101 bp, synthetic construct
  misc_feature 1..101: note = Synthetic
  modified_base 1: mod_base = OTHER; note = CY3 (Cyanine 3)
  modified_base 101: mod_base = OTHER; note = 3'DMT dC CPG (5'-Dimethoxytrityl-N-benzoyl-3'-deoxyCytosine, 2'-succinoyl-long chain alkylamino-CPG 500)
  source 1..101: mol_type = other DNA
gtgtaaatgtctccttatatgccctagaataagcactggcaatagcagcgtttccatgaatgttctccacaccaagtccatcttccttgcccacaacagaa

SEQ ID NO: 285 - DNA, 101 bp, synthetic construct
  misc_feature 1..101: note = Synthetic
  modified_base 1: mod_base = OTHER; note = CY3 (Cyanine 3)
  modified_base 101: mod_base = OTHER; note = 3'DMT dC CPG (5'-Dimethoxytrityl-N-benzoyl-3'-deoxyCytosine, 2'-succinoyl-long chain alkylamino-CPG 500)
  source 1..101: mol_type = other DNA
gtgtaaatgtctccttatatgccctagaataagcactcgcaatagcagcatttccatgtatattctccacaccaagtccatcttccttgcccacaacagaa

SEQ ID NO: 286 - DNA, 101 bp, synthetic construct
  misc_feature 1..101: note = Synthetic
  modified_base 1: mod_base = OTHER; note = CY3 (Cyanine 3)
  modified_base 101: mod_base = OTHER; note = 3'DMT dC CPG (5'-Dimethoxytrityl-N-benzoyl-3'-deoxyCytosine, 2'-succinoyl-long chain alkylamino-CPG 500)
  source 1..101: mol_type = other DNA
gtgtaaatgtctccttatatgccctagaataagcactcgcaatagcagcgtttccatgtatattctccacaccaagtccatcttccttgcccacaacagaa

SEQ ID NO: 287 - DNA, 101 bp, synthetic construct
  misc_feature 1..101: note = Synthetic
  modified_base 1: mod_base = OTHER; note = CY3 (Cyanine 3)
  modified_base 101: mod_base = OTHER; note = 3'DMT dC CPG (5'-Dimethoxytrityl-N-benzoyl-3'-deoxyCytosine, 2'-succinoyl-long chain alkylamino-CPG 500)
  source 1..101: mol_type = other DNA
agcctgtaagaataataggctggtcaagacgctgtatgcaccggatgccaagtcgagcaagataagctcctattccaacagttcttccagtcacaaatgta

SEQ ID NO: 288 - DNA, 101 bp, synthetic construct
  misc_feature 1..101: note = Synthetic
  modified_base 1: mod_base = OTHER; note = CY3 (Cyanine 3)
  modified_base 101: mod_base = OTHER; note = 3'DMT dC CPG (5'-Dimethoxytrityl-N-benzoyl-3'-deoxyCytosine, 2'-succinoyl-long chain alkylamino-CPG 500)
  source 1..101: mol_type = other DNA
agcctgtaagaataataggctggtcaagacgctgtatgcaccggatgccatgtcgagcaagataagctcctattccaacagttcttccagtcacaaatgta

SEQ ID NO: 289 - DNA, 101 bp, synthetic construct
  misc_feature 1..101: note = Synthetic
  modified_base 1: mod_base = OTHER; note = CY3 (Cyanine 3)
  modified_base 101: mod_base = OTHER; note = 3'DMT dC CPG (5'-Dimethoxytrityl-N-benzoyl-3'-deoxyCytosine, 2'-succinoyl-long chain alkylamino-CPG 500)
  source 1..101: mol_type = other DNA
agcctgtaagaataataggctggtcaagacgctgtatgcaccggatgccgtgtcgagcaagataagctcctattccaacagttcttccagtcacaaatgta

SEQ ID NO: 290 - DNA, 101 bp, synthetic construct
  misc_feature 1..101: note = Synthetic
  modified_base 1: mod_base = OTHER; note = CY3 (Cyanine 3)
  modified_base 101: mod_base = OTHER; note = 3'DMT dC CPG (5'-Dimethoxytrityl-N-benzoyl-3'-deoxyCytosine, 2'-succinoyl-long chain alkylamino-CPG 500)
  source 1..101: mol_type = other DNA
agcctgtaagaataataggctggtcaagacgctgtatgcaccggatgccatgacgagcaagataagctcctattccaacagttcttccagtcacaaatgta

SEQ ID NO: 291 - DNA, 101 bp, synthetic construct
  misc_feature 1..101: note = Synthetic
  modified_base 1: mod_base = OTHER; note = CY3 (Cyanine 3)
  modified_base 101: mod_base = OTHER; note = 3'DMT dC CPG (5'-Dimethoxytrityl-N-benzoyl-3'-deoxyCytosine, 2'-succinoyl-long chain alkylamino-CPG 500)
  source 1..101: mol_type = other DNA
agcctgtaagaataataggctggtcaagacgctgtatgcaccggatgccgtgacgagcaagataagctcctattccaacagttcttccagtcacaaatgta

SEQ ID NO: 292 - DNA, 101 bp, synthetic construct
  misc_feature 1..101: note = Synthetic
  modified_base 1: mod_base = OTHER; note = CY3 (Cyanine 3)
  modified_base 101: mod_base = OTHER; note = 3'DMT dC CPG (5'-Dimethoxytrityl-N-benzoyl-3'-deoxyCytosine, 2'-succinoyl-long chain alkylamino-CPG 500)
  source 1..101: mol_type = other DNA
agcctgtaagaataataggctggtcaagacgctgtatgcaccgtatgccatgtcgagcaagataagctcctattccaacagttcttccagtcacaaatgta

SEQ ID NO: 293 - DNA, 101 bp, synthetic construct
  misc_feature 1..101: note = Synthetic
  modified_base 1: mod_base = OTHER; note = CY3 (Cyanine 3)
  modified_base 101: mod_base = OTHER; note = 3'DMT dC CPG (5'-Dimethoxytrityl-N-benzoyl-3'-deoxyCytosine, 2'-succinoyl-long chain alkylamino-CPG 500)
  source 1..101: mol_type = other DNA
agcctgtaagaataataggctggtcaagacgctgtatgcaccgtatgccgtgtcgagcaagataagctcctattccaacagttcttccagtcacaaatgta

SEQ ID NO: 294 - DNA, 101 bp, synthetic construct
  misc_feature 1..101: note = Synthetic
  modified_base 1: mod_base = OTHER; note = CY3 (Cyanine 3)
  modified_base 101: mod_base = OTHER; note = 3'DMT dC CPG (5'-Dimethoxytrityl-N-benzoyl-3'-deoxyCytosine, 2'-succinoyl-long chain alkylamino-CPG 500)
  source 1..101: mol_type = other DNA
agcctgtaagaataataggctggtcaagacgctgtatgcagcggatgccatgtcgagcaagataagctcctattccaacagttcttccagtcacaaatgta

SEQ ID NO: 295 - DNA, 101 bp, synthetic construct
  misc_feature 1..101: note = Synthetic
  modified_base 1: mod_base = OTHER; note = CY3 (Cyanine 3)
  modified_base 101: mod_base = OTHER; note = 3'DMT dC CPG (5'-Dimethoxytrityl-N-benzoyl-3'-deoxyCytosine, 2'-succinoyl-long chain alkylamino-CPG 500)
  source 1..101: mol_type = other DNA
agcctgtaagaataataggctggtcaagacgctgtatgcagcggatgccgtgtcgagcaagataagctcctattccaacagttcttccagtcacaaatgta

SEQ ID NO: 296 - DNA, 101 bp, synthetic construct
  misc_feature 1..101: note = Synthetic
  modified_base 1: mod_base = OTHER; note = CY3 (Cyanine 3)
  modified_base 101: mod_base = OTHER; note = 3'DMT dC CPG (5'-Dimethoxytrityl-N-benzoyl-3'-deoxyCytosine, 2'-succinoyl-long chain alkylamino-CPG 500)
  source 1..101: mol_type = other DNA
gaggaagtttcttctcacaggctaggttggtaacagcttcaaaaaatgcatcttcccttgggccaaatgatccagctctgaacgtaatatcatttgcaaca

SEQ ID NO: 297 - DNA, 101 bp, synthetic construct
  misc_feature 1..101: note = Synthetic
  modified_base 1: mod_base = OTHER; note = CY3 (Cyanine 3)
  modified_base 101: mod_base = OTHER; note = 3'DMT dC CPG (5'-Dimethoxytrityl-N-benzoyl-3'-deoxyCytosine, 2'-succinoyl-long chain alkylamino-CPG 500)
  source 1..101: mol_type = other DNA
gaggaagtttcttctcacaggctaggttggtaacagcttcaaaaaatgcttcttcccttgggccaaatgatccagctctgaacgtaatatcatttgcaaca

SEQ ID NO: 298 - DNA, 101 bp, synthetic construct
  misc_feature 1..101: note = Synthetic
  modified_base 1: mod_base = OTHER; note = CY3 (Cyanine 3)
  modified_base 101: mod_base = OTHER; note = 3'DMT dC CPG (5'-Dimethoxytrityl-N-benzoyl-3'-deoxyCytosine, 2'-succinoyl-long chain alkylamino-CPG 500)
  source 1..101: mol_type = other DNA
gaggaagtttcttctcacaggctaggttggtaacagcttcaaaaaatgcctcttcccttgggccaaatgatccagctctgaacgtaatatcatttgcaaca

SEQ ID NO: 299 - DNA, 101 bp, synthetic construct
  misc_feature 1..101: note = Synthetic
  modified_base 1: mod_base = OTHER; note = CY3 (Cyanine 3)
  modified_base 101: mod_base = OTHER; note = 3'DMT dC CPG (5'-Dimethoxytrityl-N-benzoyl-3'-deoxyCytosine, 2'-succinoyl-long chain alkylamino-CPG 500)
  source 1..101: mol_type = other DNA
gaggaagtttcttctcacaggctaggttggtaacagcttcaaaaaatgctccttcccttgggccaaatgatccagctctgaacgtaatatcatttgcaaca

SEQ ID NO: 300 - DNA, 101 bp, synthetic construct
  misc_feature 1..101: note = Synthetic
  modified_base 1: mod_base = OTHER; note = CY3 (Cyanine 3)
  modified_base 101: mod_base = OTHER; note = 3'DMT dC CPG (5'-Dimethoxytrityl-N-benzoyl-3'-deoxyCytosine, 2'-succinoyl-long chain alkylamino-CPG 500)
  source 1..101: mol_type = other DNA
gaggaagtttcttctcacaggctaggttggtaacagcttcaaaaaatgcaccttcccttgggccaaatgatccagctctgaacgtaatatcatttgcaaca

SEQ ID NO: 301 - DNA, 101 bp, synthetic construct
  misc_feature 1..101: note = Synthetic
  modified_base 1: mod_base = OTHER; note = CY3 (Cyanine 3)
  modified_base 101: mod_base = OTHER; note = 3'DMT dC CPG (5'-Dimethoxytrityl-N-benzoyl-3'-deoxyCytosine, 2'-succinoyl-long chain alkylamino-CPG 500)
  source 1..101: mol_type = other DNA
gaggaagtttcttctcacaggctaggttggtaacagcttcaaaaaatgcgccttcccttgggccaaatgatccagctctgaacgtaatatcatttgcaaca

SEQ ID NO: 302 - DNA, 101 bp, synthetic construct
  misc_feature 1..101: note = Synthetic
  modified_base 1: mod_base = OTHER; note = CY3 (Cyanine 3)
  modified_base 101: mod_base = OTHER; note = 3'DMT dC CPG (5'-Dimethoxytrityl-N-benzoyl-3'-deoxyCytosine, 2'-succinoyl-long chain alkylamino-CPG 500)
  source 1..101: mol_type = other DNA
gaggaagtttcttctcacaggctaggttggtaacagcttcaaaaaatgccccttcccttgggccaaatgatccagctctgaacgtaatatcatttgcaaca

SEQ ID NO: 303 - DNA, 101 bp, synthetic construct
  misc_feature 1..101: note = Synthetic
  modified_base 1: mod_base = OTHER; note = CY3 (Cyanine 3)
  modified_base 101: mod_base = OTHER; note = 3'DMT dC CPG (5'-Dimethoxytrityl-N-benzoyl-3'-deoxyCytosine, 2'-succinoyl-long chain alkylamino-CPG 500)
  source 1..101: mol_type = other DNA
gaggaagtttcttctcacaggctaggttggtaacagcttcaaaaaatgcttcttctcttgggccaaatgatccagctctgaacgtaatatcatttgcaaca

SEQ ID NO: 304 - DNA, 101 bp, synthetic construct
  misc_feature 1..101: note = Synthetic
  modified_base 1: mod_base = OTHER; note = CY3 (Cyanine 3)
  modified_base 101: mod_base = OTHER; note = 3'DMT dC CPG (5'-Dimethoxytrityl-N-benzoyl-3'-deoxyCytosine, 2'-succinoyl-long chain alkylamino-CPG 500)
  source 1..101: mol_type = other DNA
gaggaagtttcttctcacaggctaggttggtaacagcttcaaaaaatgcctcttctcttgggccaaatgatccagctctgaacgtaatatcatttgcaaca

SEQ ID NO: 305 - DNA, 101 bp, synthetic construct
  misc_feature 1..101: note = Synthetic
  modified_base 1: mod_base = OTHER; note = CY3 (Cyanine 3)
  modified_base 101: mod_base = OTHER; note = 3'DMT dC CPG (5'-Dimethoxytrityl-N-benzoyl-3'-deoxyCytosine, 2'-succinoyl-long chain alkylamino-CPG 500)
  source 1..101: mol_type = other DNA
gaggaagtttcttctcacaggctaggttggtaacagcttcaaaaaatgctccttctcttgggccaaatgatccagctctgaacgtaatatcatttgcaaca

SEQ ID NO: 306 - DNA, 101 bp, synthetic construct
  misc_feature 1..101: note = Synthetic
  modified_base 1: mod_base = OTHER; note = CY3 (Cyanine 3)
  modified_base 101: mod_base = OTHER; note = 3'DMT dC CPG (5'-Dimethoxytrityl-N-benzoyl-3'-deoxyCytosine, 2'-succinoyl-long chain alkylamino-CPG 500)
  source 1..101: mol_type = other DNA
gaggaagtttcttctcacaggctaggttggtaacagcttcaaaaaatgcaccttctcttgggccaaatgatccagctctgaacgtaatatcatttgcaaca

SEQ ID NO: 307 - DNA, 101 bp, synthetic construct
  misc_feature 1..101: note = Synthetic
  modified_base 1: mod_base = OTHER; note = CY3 (Cyanine 3)
  modified_base 101: mod_base = OTHER; note = 3'DMT dC CPG (5'-Dimethoxytrityl-N-benzoyl-3'-deoxyCytosine, 2'-succinoyl-long chain alkylamino-CPG 500)
  source 1..101: mol_type = other DNA
gaggaagtttcttctcacaggctaggttggtaacagcttcaaaaaatgcgccttctcttgggccaaatgatccagctctgaacgtaatatcatttgcaaca

SEQ ID NO: 308 - DNA, 101 bp, synthetic construct
  misc_feature 1..101: note = Synthetic
  modified_base 1: mod_base = OTHER; note = CY3 (Cyanine 3)
  modified_base 101: mod_base = OTHER; note = 3'DMT dC CPG (5'-Dimethoxytrityl-N-benzoyl-3'-deoxyCytosine, 2'-succinoyl-long chain alkylamino-CPG 500)
  source 1..101: mol_type = other DNA
gaggaagtttcttctcacaggctaggttggtaacagcttcaaaaaatgccccttctcttgggccaaatgatccagctctgaacgtaatatcatttgcaaca

SEQ ID NO: 309 - DNA, 101 bp, synthetic construct
  misc_feature 1..101: note = Synthetic
  modified_base 1: mod_base = OTHER; note = CY3 (Cyanine 3)
  modified_base 101: mod_base = OTHER; note = 3'DMT dC CPG (5'-Dimethoxytrityl-N-benzoyl-3'-deoxyCytosine, 2'-succinoyl-long chain alkylamino-CPG 500)
  source 1..101: mol_type = other DNA
gaggaagtttcttctcacaggctaggttggtaacagcttcaaaaaatgcttcttccctagggccaaatgatccagctctgaacgtaatatcatttgcaaca

SEQ ID NO: 310 - DNA, 101 bp, synthetic construct
  misc_feature 1..101: note = Synthetic
  modified_base 1: mod_base = OTHER; note = CY3 (Cyanine 3)
  modified_base 101: mod_base = OTHER; note = 3'DMT dC CPG (5'-Dimethoxytrityl-N-benzoyl-3'-deoxyCytosine, 2'-succinoyl-long chain alkylamino-CPG 500)
  source 1..101: mol_type = other DNA
gaggaagtttcttctcacaggctaggttggtaacagcttcaaaaaatgcctcttccctagggccaaatgatccagctctgaacgtaatatcatttgcaaca

SEQ ID NO: 311 - DNA, 101 bp, synthetic construct
  misc_feature 1..101: note = Synthetic
  modified_base 1: mod_base = OTHER; note = CY3 (Cyanine 3)
  modified_base 101: mod_base = OTHER; note = 3'DMT dC CPG (5'-Dimethoxytrityl-N-benzoyl-3'-deoxyCytosine, 2'-succinoyl-long chain alkylamino-CPG 500)
  source 1..101: mol_type = other DNA
gaggaagtttcttctcacaggctaggttggtaacagcttcaaaaaatgctccttccctagggccaaatgatccagctctgaacgtaatatcatttgcaaca

SEQ ID NO: 312 - DNA, 101 bp, synthetic construct
  misc_feature 1..101: note = Synthetic
  modified_base 1: mod_base = OTHER; note = CY3 (Cyanine 3)
  modified_base 101: mod_base = OTHER; note = 3'DMT dC CPG (5'-Dimethoxytrityl-N-benzoyl-3'-deoxyCytosine, 2'-succinoyl-long chain alkylamino-CPG 500)
  source 1..101: mol_type = other DNA
gaggaagtttcttctcacaggctaggttggtaacagcttcaaaaaatgcaccttccctagggccaaatgatccagctctgaacgtaatatcatttgcaaca

SEQ ID NO: 313 - DNA, 101 bp, synthetic construct
  misc_feature 1..101: note = Synthetic
  modified_base 1: mod_base = OTHER; note = CY3 (Cyanine 3)
  modified_base 101: mod_base = OTHER; note = 3'DMT dC CPG (5'-Dimethoxytrityl-N-benzoyl-3'-deoxyCytosine, 2'-succinoyl-long chain alkylamino-CPG 500)
  source 1..101: mol_type = other DNA
gaggaagtttcttctcacaggctaggttggtaacagcttcaaaaaatgcgccttccctagggccaaatgatccagctctgaacgtaatatcatttgcaaca

SEQ ID NO: 314 - DNA, 101 bp, synthetic construct
  misc_feature 1..101: note = Synthetic
  modified_base 1: mod_base = OTHER; note = CY3 (Cyanine 3)
  modified_base 101: mod_base = OTHER; note = 3'DMT dC CPG (5'-Dimethoxytrityl-N-benzoyl-3'-deoxyCytosine, 2'-succinoyl-long chain alkylamino-CPG 500)
  source 1..101: mol_type = other DNA
gaggaagtttcttctcacaggctaggttggtaacagcttcaaaaaatgccccttccctagggccaaatgatccagctctgaacgtaatatcatttgcaaca

SEQ ID NO: 315 - DNA, 114 bp, synthetic construct; identical to SEQ ID NO: 95
  misc_feature 1..114: note = Synthetic
  modified_base 1: mod_base = OTHER; note = CY3 (Cyanine 3)
  modified_base 114: mod_base = OTHER; note = 3'DMT dC CPG (5'-Dimethoxytrityl-N-benzoyl-3'-deoxyCytosine, 2'-succinoyl-long chain alkylamino-CPG 500)
  source 1..114: mol_type = other DNA

SEQ ID NO: 316 - DNA, 20 bp, synthetic construct
  misc_feature 1..20: note = Synthetic
  source 1..20: mol_type = other DNA
gcattgagtgctatgctgag

SEQ ID NO: 317 - DNA, 20 bp, synthetic construct
  misc_feature 1..20: note = Synthetic
  source 1..20: mol_type = other DNA
tctcagcatagcactcaatg

SEQ ID NO: 318 - DNA, 20 bp, synthetic construct
  misc_feature 1..20: note = Synthetic
  source 1..20: mol_type = other DNA
gcatagcactcaatgcggtc

SEQ ID NO: 319 - DNA, 20 bp, synthetic construct
  misc_feature 1..20: note = Synthetic
  source 1..20: mol_type = other DNA
catagcactcaatgcggtct

SEQ ID NO: 320 - DNA, 20 bp, synthetic construct
  misc_feature 1..20: note = Synthetic
  source 1..20: mol_type = other DNA
ggaggggcttgggttgtcgt

SEQ ID NO: 321 - DNA, 20 bp, synthetic construct
  misc_feature 1..20: note = Synthetic
  source 1..20: mol_type = other DNA
agagctacgaggaggggctt

SEQ ID NO: 322 - DNA, 20 bp, synthetic construct
  misc_feature 1..20: note = Synthetic
  source 1..20: mol_type = other DNA
cagagctacgaggaggggct

SEQ ID NO: 323 - DNA, 20 bp, synthetic construct
  misc_feature 1..20: note = Synthetic
  source 1..20: mol_type = other DNA
ggctgcagagctacgaggag

SEQ ID NO: 324 - DNA, 20 bp, synthetic construct
  misc_feature 1..20: note = Synthetic
  source 1..20: mol_type = other DNA
tggctgcagagctacgagga

SEQ ID NO: 325 - DNA, 20 bp, synthetic construct
  misc_feature 1..20: note = Synthetic
  source 1..20: mol_type = other DNA
atggctgcagagctacgagg

SEQ ID NO: 326 - DNA, 20 bp, synthetic construct
  misc_feature 1..20: note = Synthetic
  source 1..20: mol_type = other DNA
tcctcgtagctctgcagcca

SEQ ID NO: 327 - DNA, 20 bp, synthetic construct
  misc_feature 1..20: note = Synthetic
  source 1..20: mol_type = other DNA
cccatggctgcagagctacg

SEQ ID NO: 328 - DNA, 20 bp, synthetic construct
  misc_feature 1..20: note = Synthetic
  source 1..20: mol_type = other DNA
cctcgtagctctgcagccat

SEQ ID NO: 329 - DNA, 24 bp, synthetic construct
  misc_feature 1..24: note = Synthetic
  source 1..24: mol_type = other DNA
cagtcctctcagcatagcactcaa

SEQ ID NO: 330 - DNA, 24 bp, synthetic construct
  misc_feature 1..24: note = Synthetic
  source 1..24: mol_type = other DNA
tcttgcttccaacgacaacccaag

SEQ ID NO: 331 - DNA, 24 bp, synthetic construct
  misc_feature 1..24: note = Synthetic
  source 1..24: mol_type = other DNA
tcttgcttccaacgacaacccaag

SEQ ID NO: 332 - DNA, 20 bp, synthetic construct
  misc_feature 1..20: note = Synthetic
  source 1..20: mol_type = other DNA
ggagctacgaggaggggctt

SEQ ID NO: 333 - DNA, 20 bp, synthetic construct
  misc_feature 1..20: note = Synthetic
  source 1..20: mol_type = other DNA
aagcccctcctcgtagctcc

SEQ ID NO: 334 - DNA, 24 bp, synthetic construct
  misc_feature 1..24: note = Synthetic
  source 1..24: mol_type = other DNA
cttgggttgtcgttggaagcaaga

SEQ ID NO: 335 - DNA, 24 bp, synthetic construct
  misc_feature 1..24: note = Synthetic
  source 1..24: mol_type = other DNA
cttgggttgtcgttggaagcaaga

SEQ ID NO: 336 - DNA, 24 bp, synthetic construct
  misc_feature 1..24: note = Synthetic
  source 1..24: mol_type = other DNA
ttgagtgctatgctgagaggactg

SEQ ID NO: 337 - DNA, 20 bp, synthetic construct
  misc_feature 1..20: note = Synthetic
  source 1..20: mol_type = other DNA
atggctgcagagctacgagg

SEQ ID NO: 338 - DNA, 20 bp, synthetic construct
  misc_feature 1..20: note = Synthetic
  source 1..20: mol_type = other DNA
cgtagctctgcagccatggg

SEQ ID NO: 339 - DNA, 20 bp, synthetic construct
  misc_feature 1..20: note = Synthetic
  source 1..20: mol_type = other DNA
tggctgcagagctacgagga

SEQ ID NO: 340 - DNA, 20 bp, synthetic construct
  misc_feature 1..20: note = Synthetic
  source 1..20: mol_type = other DNA
cctcgtagctctgcagccat

SEQ ID NO: 341 - DNA, 20 bp, synthetic construct
  misc_feature 1..20: note = Synthetic
  source 1..20: mol_type = other DNA
tcctcgtagctctgcagcca

SEQ ID NO: 342 - DNA, 20 bp, synthetic construct
  misc_feature 1..20: note = Synthetic
  source 1..20: mol_type = other DNA
ctcctcgtagctctgcagcc

SEQ ID NO: 343 - DNA, 20 bp, synthetic construct
  misc_feature 1..20: note = Synthetic
  source 1..20: mol_type = other DNA
agcccctcctcgtagctctg

SEQ ID NO: 344 - DNA, 20 bp, synthetic construct
  misc_feature 1..20: note = Synthetic
  source 1..20: mol_type = other DNA
aagcccctcctcgtagctct

SEQ ID NO: 345 - DNA, 20 bp, synthetic construct
  misc_feature 1..20: note = Synthetic
  source 1..20: mol_type = other DNA
acgacaacccaagcccctcc

SEQ ID NO: 346 - DNA, 20 bp, synthetic construct
  misc_feature 1..20: note = Synthetic
  source 1..20: mol_type = other DNA
agaccgcattgagtgctatg

SEQ ID NO: 347 - DNA, 20 bp, synthetic construct
  misc_feature 1..20: note = Synthetic
  source 1..20: mol_type = other DNA
gaccgcattgagtgctatgc

SEQ ID NO: 348 - DNA, 20 bp, synthetic construct
  misc_feature 1..20: note = Synthetic
  source 1..20: mol_type = other DNA
cattgagtgctatgctgaga

SEQ ID NO: 349 - DNA, 20 bp, synthetic construct
  misc_feature 1..20: note = Synthetic
  source 1..20: mol_type = other DNA
ctcagcatagcactcaatgc

SEQ ID NO: 350 - DNA, 101 bp, synthetic construct
  misc_feature 1..101: note = Synthetic
  source 1..101: mol_type = other DNA
tacattcccatggctgcagagctacgaggaggggcttgggttgtcgttggaagcaagataaacccagaccgcattgagtgctatgctgagaggactgcaaa

SEQ ID NO: 351 - DNA, 101 bp, synthetic construct
  misc_feature 1..101: note = Synthetic
  source 1..101: mol_type = other DNA
tacattcccatggctgcagagctacgaggaggggcttgggttgtcgttggtagcaagataaacccagaccgcattgagtgctatgctgagaggactgcaaa

SEQ ID NO: 352 - DNA, 101 bp, synthetic construct
  misc_feature 1..101: note = Synthetic
  source 1..101: mol_type = other DNA
tacattcccatggctgcagagctacgaggaggggcttgggttgtcgttggcagcaagataaacccagaccgcattgagtgctatgctgagaggactgcaaa

SEQ ID NO: 353 - DNA, 101 bp, synthetic construct
  misc_feature 1..101: note = Synthetic
  source 1..101: mol_type = other DNA
tacattcccatggctgcagagctacgaggaggggcttgggttgtcgttgggagcaagataaacccagaccgcattgagtgctatgctgagaggactgcaaa

SEQ ID NO: 354 - DNA, 101 bp, synthetic construct
  misc_feature 1..101: note = Synthetic
  source 1..101: mol_type = other DNA
tacattcccatggctgcagagctacgaggaggggcttgggttgtcgttggaagcaagataaacacagaccgcattgagtgctatgctgagaggactgcaaa

SEQ ID NO: 355 - DNA, 101 bp, synthetic construct
  misc_feature 1..101: note = Synthetic
  source 1..101: mol_type = other DNA
tacattcccatggctgcagagctacgaggaggggcttgggttgtcgttggtagcaagataaacacagaccgcattgagtgctatgctgagaggactgcaaa

SEQ ID NO: 356 - DNA, 101 bp, synthetic construct
  misc_feature 1..101: note = Synthetic
  source 1..101: mol_type = other DNA
tacattcccatggctgcagagctacgaggaggggcttgggttgtcgttggcagcaagataaacacagaccgcattgagtgctatgctgagaggactgcaaa

SEQ ID NO: 357 - DNA, 101 bp, synthetic construct
  misc_feature 1..101: note = Synthetic
  source 1..101: mol_type = other DNA
tacattcccatggctgcagagctacgaggaggggcttgggttgtcgttgggagcaagataaacacagaccgcattgagtgctatgctgagaggactgcaaa

SEQ ID NO: 358 - DNA, 101 bp, synthetic construct
  misc_feature 1..101: note = Synthetic
  source 1..101: mol_type = other DNA
tacattcccatggctgcagagctacgaggaggggcttgggttgtcgttggaagcaagataaacacggaccgcattgagtgctatgctgagaggactgcaaa

SEQ ID NO: 359 - DNA, 101 bp, synthetic construct
  misc_feature 1..101: note = Synthetic
  source 1..101: mol_type = other DNA
tacattcccatggctgcagagctacgaggaggggcttgggttgtcgttggtagcaagataaacacggaccgcattgagtgctatgctgagaggactgcaaa

SEQ ID NO: 360 - DNA, 101 bp, synthetic construct
  misc_feature 1..101: note = Synthetic
  source 1..101: mol_type = other DNA
tacattcccatggctgcagagctacgaggaggggcttgggttgtcgttggcagcaagataaacacggaccgcattgagtgctatgctgagaggactgcaaa

SEQ ID NO: 361 - DNA, 101 bp, synthetic construct
  misc_feature 1..101: note = Synthetic
  source 1..101: mol_type = other DNA
tacattcccatggctgcagagctacgaggaggggcttgggttgtcgttgggagcaagataaacacggaccgcattgagtgctatgctgagaggactgcaaa

SEQ ID NO: 362 - DNA, 101 bp, synthetic construct
  misc_feature 1..101: note = Synthetic
  source 1..101: mol_type = other DNA
tacattcccatggctgcagagctacgaggaggggcttgggttgtcgttggaagcaagataaacactgaccgcattgagtgctatgctgagaggactgcaaa

SEQ ID NO: 363 - DNA, 101 bp, synthetic construct
  misc_feature 1..101: note = Synthetic
  source 1..101: mol_type = other DNA
tacattcccatggctgcagagctacgaggaggggcttgggttgtcgttggtagcaagataaacactgaccgcattgagtgctatgctgagaggactgcaaa

SEQ ID NO: 364 - DNA, 101 bp, synthetic construct
  misc_feature 1..101: note = Synthetic
  source 1..101: mol_type = other DNA
tacattcccatggctgcagagctacgaggaggggcttgggttgtcgttggcagcaagataaacactgaccgcattgagtgctatgctgagaggactgcaaa

SEQ ID NO: 365 - DNA, 101 bp, synthetic construct
  misc_feature 1..101: note = Synthetic
  source 1..101: mol_type = other DNA
tacattcccatggctgcagagctacgaggaggggcttgggttgtcgttgggagcaagataaacactgaccgcattgagtgctatgctgagaggactgcaaa

SEQ ID NO: 366 - DNA, 101 bp, synthetic construct
  misc_feature 1..101: note = Synthetic
  source 1..101: mol_type = other DNA
tacattcccatggctgcagagctacgaggaggggcttgggttgtcgttggaagcaagataaacaccgaccgcattgagtgctatgctgagaggactgcaaa

SEQ ID NO: 367 - DNA, 101 bp, synthetic construct
  misc_feature 1..101: note = Synthetic
  source 1..101: mol_type = other DNA
tacattcccatggctgcagagctacgaggaggggcttgggttgtcgttggtagcaagataaacaccgaccgcattgagtgctatgctgagaggactgcaaa

SEQ ID NO: 368 - DNA, 101 bp, synthetic construct
  misc_feature 1..101: note = Synthetic
  source 1..101: mol_type = other DNA
tacattcccatggctgcagagctacgaggaggggcttgggttgtcgttggcagcaagataaacaccgaccgcattgagtgctatgctgagaggactgcaaa

SEQ ID NO: 369 - DNA, 101 bp, synthetic construct
  misc_feature 1..101: note = Synthetic
  source 1..101: mol_type = other DNA
tacattcccatggctgcagagctacgaggaggggcttgggttgtcgttgggagcaagataaacaccgaccgcattgagtgctatgctgagaggactgcaaa

SEQ ID NO: 370 - DNA, 101 bp, synthetic construct
  misc_feature 1..101: note = Synthetic
  source 1..101: mol_type = other DNA
tacattcccatggctgcagagctacgaggaggggcttgggttgtcgttgatagcaagataaacacagaccgcattgagtgctatgctgagaggactgcaaa

SEQ ID NO: 371 - DNA, 101 bp, synthetic construct
  misc_feature 1..101: note = Synthetic
  source 1..101: mol_type = other DNA
tacattcccatggctgcagagctacgaggaggggcttgggttgtcgttgatagcaagataaacacggaccgcattgagtgctatgctgagaggactgcaaa

SEQ ID NO: 372 - DNA, 101 bp, synthetic construct
  misc_feature 1..101: note = Synthetic
  source 1..101: mol_type = other DNA
tacattcccatggctgcagagctacgaggaggggcttgggttgtcgttgatagcaagataaacactgaccgcattgagtgctatgctgagaggactgcaaa

SEQ ID NO: 373 - DNA, 201 bp, synthetic construct
  misc_feature 1..201: note = Synthetic
  source 1..201: mol_type = other DNA
gctcgactattgttgagaaccttaggacatacaatcagcctgcctttgtctacattcccatggctgcagagctacgaggaggggcttgggttgtcgttggaagcaagataaacccagaccgcattgagtgctatgctgagaggactgcaaaaggcaatgttctggaaccgcaagggttaattgagatcaagttcaggtcag

SEQ ID NO: 374 - DNA, 201 bp, synthetic construct; identical to SEQ ID NO: 155
  misc_feature 1..201: note = Synthetic
  source 1..201: mol_type = other DNA

SEQ ID NO: 375 - DNA, 201 bp, synthetic construct
  misc_feature 1..201: note = Synthetic
  source 1..201: mol_type = other DNA
gctcgactattgttgagaaccttaggacatacaatcagcctgcctttgtctacattcccatggctgcagagctacgaggaggggcttgggttgtcgttggcagcaagataaacccagaccgcattgagtgctatgctgagaggactgcaaaaggcaatgttctggaaccgcaagggttaattgagatcaagttcaggtcag

SEQ ID NO: 376 - DNA, 201 bp, synthetic construct
  misc_feature 1..201: note = Synthetic
  source 1..201: mol_type = other DNA
gctcgactattgttgagaaccttaggacatacaatcagcctgcctttgtctacattcccatggctgcagagctacgaggaggggcttgggttgtcgttgggagcaagataaacccagaccgcattgagtgctatgctgagaggactgcaaaaggcaatgttctggaaccgcaagggttaattgagatcaagttcaggtcag

SEQ ID NO: 377 - DNA, 201 bp, synthetic construct
  misc_feature 1..201: note = Synthetic
  source 1..201: mol_type = other DNA
gctcgactattgttgagaaccttaggacatacaatcagcctgcctttgtctacattcccatggctgcagagctacgaggaggggcttgggttgtcgttggaagcaagataaacacagaccgcattgagtgctatgctgagaggactgcaaaaggcaatgttctggaaccgcaagggttaattgagatcaagttcaggtcag

SEQ ID NO: 378 - DNA, 201 bp, synthetic construct
  misc_feature 1..201: note = Synthetic
  source 1..201: mol_type = other DNA
gctcgactattgttgagaaccttaggacatacaatcagcctgcctttgtctacattcccatggctgcagagctacgaggaggggcttgggttgtcgttggtagcaagataaacacagaccgcattgagtgctatgctgagaggactgcaaaaggcaatgttctggaaccgcaagggttaattgagatcaagttcaggtcag

SEQ ID NO: 379 - DNA, 201 bp, synthetic construct
  misc_feature 1..201: note = Synthetic
  source 1..201: mol_type = other DNA
gctcgactattgttgagaaccttaggacatacaatcagcctgcctttgtctacattcccatggctgcagagctacgaggaggggcttgggttgtcgttggcagcaagataaacacagaccgcattgagtgctatgctgagaggactgcaaaaggcaatgttctggaaccgcaagggttaattgagatcaagttcaggtcag

SEQ ID NO: 380 - DNA, 201 bp, synthetic construct
  misc_feature 1..201: note = Synthetic
  source 1..201: mol_type = other DNA
gctcgactattgttgagaaccttaggacatacaatcagcctgcctttgtctacattcccatggctgcagagctacgaggaggggcttgggttgtcgttgggagcaagataaacacagaccgcattgagtgctatgctgagaggactgcaaaaggcaatgttctggaaccgcaagggttaattgagatcaagttcaggtcag

SEQ ID NO: 381 - DNA, 201 bp, synthetic construct
  misc_feature 1..201: note = Synthetic
  source 1..201: mol_type = other DNA
gctcgactattgttgagaaccttaggacatacaatcagcctgcctttgtctacattcccatggctgcagagctacgaggaggggcttgggttgtcgttggaagcaagataaacacggaccgcattgagtgctatgctgagaggactgcaaaaggcaatgttctggaaccgcaagggttaattgagatcaagttcaggtcag

SEQ ID NO: 382 - DNA, 201 bp, synthetic construct
  misc_feature 1..201: note = Synthetic
  source 1..201: mol_type = other DNA
gctcgactattgttgagaaccttaggacatacaatcagcctgcctttgtctacattcccatggctgcagagctacgaggaggggcttgggttgtcgttggtagcaagataaacacggaccgcattgagtgctatgctgagaggactgcaaaaggcaatgttctggaaccgcaagggttaattgagatcaagttcaggtcag

SEQ ID NO: 383 - DNA, 201 bp, synthetic construct
  misc_feature 1..201: note = Synthetic
  source 1..201: mol_type = other DNA
gctcgactattgttgagaaccttaggacatacaatcagcctgcctttgtctacattcccatggctgcagagctacgaggaggggcttgggttgtcgttggcagcaagataaacacggaccgcattgagtgctatgctgagaggactgcaaaaggcaatgttctggaaccgcaagggttaattgagatcaagttcaggtcag

SEQ ID NO: 384 - DNA, 201 bp, synthetic construct
  misc_feature 1..201: note = Synthetic
  source 1..201: mol_type = other DNA
gctcgactattgttgagaaccttaggacatacaatcagcctgcctttgtctacattcccatggctgcagagctacgaggaggggcttgggttgtcgttgggagcaagataaacacggaccgcattgagtgctatgctgagaggactgcaaaaggcaatgttctggaaccgcaagggttaattgagatcaagttcaggtcag

SEQ ID NO: 385 - DNA, 201 bp, synthetic construct
  misc_feature 1..201: note = Synthetic
  source 1..201: mol_type = other DNA
gctcgactattgttgagaaccttaggacatacaatcagcctgcctttgtctacattcccatggctgcagagctacgaggaggggcttgggttgtcgttggaagcaagataaacactgaccgcattgagtgctatgctgagaggactgcaaaaggcaatgttctggaaccgcaagggttaattgagatcaagttcaggtcag

SEQ ID NO: 386 - DNA, 201 bp, synthetic construct
  misc_feature 1..201: note = Synthetic
  source 1..201: mol_type = other DNA
gctcgactattgttgagaaccttaggacatacaatcagcctgcctttgtctacattcccatggctgcagagctacgaggaggggcttgggttgtcgttggtagcaagataaacactgaccgcattgagtgctatgctgagaggactgcaaaaggcaatgttctggaaccgcaagggttaattgagatcaagttcaggtcag

SEQ ID NO: 387 - DNA, 201 bp, synthetic construct
  misc_feature 1..201: note = Synthetic
  source 1..201: mol_type = other DNA
gctcgactattgttgagaaccttaggacatacaatcagcctgcctttgtctacattcccatggctgcagagctacgaggaggggcttgggttgtcgttggcagcaagataaacactgaccgcattgagtgctatgctgagaggactgcaaaaggcaatgttctggaaccgcaagggttaattgagatcaagttcaggtcag

SEQ ID NO: 388 - DNA, 201 bp, synthetic construct
  misc_feature 1..201: note = Synthetic
  source 1..201: mol_type = other DNA
gctcgactattgttgagaaccttaggacatacaatcagcctgcctttgtctacattcccatggctgcagagctacgaggaggggcttgggttgtcgttgggagcaagataaacactgaccgcattgagtgctatgctgagaggactgcaaaaggcaatgttctggaaccgcaagggttaattgagatcaagttcaggtcag

SEQ ID NO: 389 - DNA, 201 bp, synthetic construct
  misc_feature 1..201: note = Synthetic
  source 1..201: mol_type = other DNA
gctcgactattgttgagaaccttaggacatacaatcagcctgcctttgtctacattcccatggctgcagagctacgaggaggggcttgggttgtcgttggtagcaagataaacaccgaccgcattgagtgctatgctgagaggactgcaaaaggcaatgttctggaaccgcaagggttaattgagatcaagttcaggtcag

SEQ ID NO: 390 - DNA, 201 bp, synthetic construct
  misc_feature 1..201: note = Synthetic
  source 1..201: mol_type = other DNA
gctcgactattgttgagaaccttaggacatacaatcagcctgcctttgtctacattcccatggctgcagagctacgaggaggggcttgggttgtcgttggcagcaagataaacaccgaccgcattgagtgctatgctgagaggactgcaaaaggcaatgttctggaaccgcaagggttaattgagatcaagttcaggtcag

SEQ ID NO: 391 - DNA, 201 bp, synthetic construct
  misc_feature 1..201: note = Synthetic
  source 1..201: mol_type = other DNA
gctcgactattgttgagaaccttaggacatacaatcagcctgcctttgtctacattcccatggctgcagagctacgaggaggggcttgggttgtcgttgggagcaagataaacaccgaccgcattgagtgctatgctgagaggactgcaaaaggcaatgttctggaaccgcaagggttaattgagatcaagttcaggtcag

SEQ ID NO: 392 - DNA, 201 bp, synthetic construct
  misc_feature 1..201: note = Synthetic
  source 1..201: mol_type = other DNA
gctcgactattgttgagaaccttaggacatacaatcagcctgcctttgtctacattcccatggctgcagagctacgaggaggggcttgggttgtcgttgatagcaagataaacacagaccgcattgagtgctatgctgagaggactgcaaaaggcaatgttctggaaccgcaagggttaattgagatcaagttcaggtcag

SEQ ID NO: 393 - DNA, 201 bp, synthetic construct
  misc_feature 1..201: note = Synthetic
  source 1..201: mol_type = other DNA
gctcgactattgttgagaaccttaggacatacaatcagcctgcctttgtctacattcccatggctgcagagctacgaggaggggcttgggttgtcgttgatagcaagataaacacggaccgcattgagtgctatgctgagaggactgcaaaaggcaatgttctggaaccgcaagggttaattgagatcaagttcaggtcag

SEQ ID NO: 394 - DNA, 201 bp, synthetic construct
  misc_feature 1..201: note = Synthetic
  source 1..201: mol_type = other DNA
gctcgactattgttgagaaccttaggacatacaatcagcctgcctttgtctacattcccatggctgcagagctacgaggaggggcttgggttgtcgttgatagcaagataaacactgaccgcattgagtgctatgctgagaggactgcaaaaggcaatgttctggaaccgcaagggttaattgagatcaagttcaggtcag

SEQ ID NO: 395 - DNA, 201 bp, synthetic construct
  misc_feature 1..201: note = Synthetic
  source 1..201: mol_type = other DNA
gctcgactattgttgagaaccttaggacatacaatcagcctgcctttgtctacattcccatggctgcagagctacgaggaggggcttgggttgtcgttgatagcaagataaacaccgaccgcattgagtgctatgctgagaggactgcaaaaggcaatgttctggaaccgcaagggttaattgagatcaagttcaggtcag

SEQ ID NO: 396 - DNA, 101 bp, synthetic construct; identical to SEQ ID NO: 166
  misc_feature 1..101: note = Synthetic
  source 1..101: mol_type = other DNA

SEQ ID NO: 397 - DNA, 101 bp, synthetic construct
  misc_feature 1..101: note = Synthetic
  source 1..101: mol_type = other DNA
tttgcagtcctctcagcatagcactcaatgcggtctgggtttatcttgctaccaacgacaacccaagcccctcctcgtagctctgcagccatgggaatgta

SEQ ID NO: 398 - DNA, 101 bp, synthetic construct
  misc_feature 1..101: note = Synthetic
  source 1..101: mol_type = other DNA
tttgcagtcctctcagcatagcactcaatgcggtctgggtttatcttgctgccaacgacaacccaagcccctcctcgtagctctgcagccatgggaatgta

SEQ ID NO: 399 - DNA, 101 bp, synthetic construct
  misc_feature 1..101: note = Synthetic
  source 1..101: mol_type = other DNA
tttgcagtcctctcagcatagcactcaatgcggtctgggtttatcttgctcccaacgacaacccaagcccctcctcgtagctctgcagccatgggaatgta

SEQ ID NO: 400 - DNA, 101 bp, synthetic construct
  misc_feature 1..101: note = Synthetic
  source 1..101: mol_type = other DNA
tttgcagtcctctcagcatagcactcaatgcggtctgtgtttatcttgcttccaacgacaacccaagcccctcctcgtagctctgcagccatgggaatgta

SEQ ID NO: 401 - DNA, 101 bp, synthetic construct
  misc_feature 1..101: note = Synthetic
  source 1..101: mol_type = other DNA
tttgcagtcctctcagcatagcactcaatgcggtctgtgtttatcttgctaccaacgacaacccaagcccctcctcgtagctctgcagccatgggaatgta

SEQ ID NO: 402 - DNA, 101 bp, synthetic construct
  misc_feature 1..101: note = Synthetic
  source 1..101: mol_type = other DNA
tttgcagtcctctcagcatagcactcaatgcggtctgtgtttatcttgctgccaacgacaacccaagcccctcctcgtagctctgcagccatgggaatgta

SEQ ID NO: 403 - DNA, 101 bp, synthetic construct
  misc_feature 1..101: note = Synthetic
  source 1..101: mol_type = other DNA
tttgcagtcctctcagcatagcactcaatgcggtctgtgtttatcttgctcccaacgacaacccaagcccctcctcgtagctctgcagccatgggaatgta

SEQ ID NO: 404 - DNA, 101 bp, synthetic construct
  misc_feature 1..101: note = Synthetic
  source 1..101: mol_type = other DNA
tttgcagtcctctcagcatagcactcaatgcggtccgtgtttatcttgcttccaacgacaacccaagcccctcctcgtagctctgcagccatgggaatgta

SEQ ID NO: 405 - DNA, 101 bp, synthetic construct
  misc_feature 1..101: note = Synthetic
  source 1..101: mol_type = other DNA
tttgcagtcctctcagcatagcactcaatgcggtccgtgtttatcttgctaccaacgacaacccaagcccctcctcgtagctctgcagccatgggaatgta

SEQ ID NO: 406 - DNA, 101 bp, synthetic construct
  misc_feature 1..101: note = Synthetic
  source 1..101: mol_type = other DNA
tttgcagtcctctcagcatagcactcaatgcggtccgtgtttatcttgctgccaacgacaacccaagcccctcctcgtagctctgcagccatgggaatgta

SEQ ID NO: 407 - DNA, 101 bp, synthetic construct
  misc_feature 1..101: note = Synthetic
  source 1..101: mol_type = other DNA
tttgcagtcctctcagcatagcactcaatgcggtccgtgtttatcttgctcccaacgacaacccaagcccctcctcgtagctctgcagccatgggaatgta

SEQ ID NO: 408 - DNA, 101 bp, synthetic construct
  misc_feature 1..101: note = Synthetic
  source 1..101: mol_type = other DNA
tttgcagtcctctcagcatagcactcaatgcggtcagtgtttatcttgcttccaacgacaacccaagcccctcctcgtagctctgcagccatgggaatgta

SEQ ID NO: 409 - DNA, 101 bp, synthetic construct
  misc_feature 1..101: note = Synthetic
  source 1..101: mol_type = other DNA
tttgcagtcctctcagcatagcactcaatgcggtcagtgtttatcttgctaccaacgacaacccaagcccctcctcgtagctctgcagccatgggaatgta

SEQ ID NO: 410 - DNA, 101 bp, synthetic construct
  misc_feature 1..101: note = Synthetic
  source 1..101: mol_type = other DNA
tttgcagtcctctcagcatagcactcaatgcggtcagtgtttatcttgctgccaacgacaacccaagcccctcctcgtagctctgcagccatgggaatgta

SEQ ID NO: 411 - DNA, 101 bp, synthetic construct
  misc_feature 1..101: note = Synthetic
  source 1..101: mol_type = other DNA
tttgcagtcctctcagcatagcactcaatgcggtcagtgtttatcttgctcccaacgacaacccaagcccctcctcgtagctctgcagccatgggaatgta

SEQ ID NO: 412 - DNA, 101 bp, synthetic construct
  misc_feature 1..101: note = Synthetic
  source 1..101: mol_type = other DNA
tttgcagtcctctcagcatagcactcaatgcggtcggtgtttatcttgcttccaacgacaacccaagcccctcctcgtagctctgcagccatgggaatgta

SEQ ID NO: 413 - DNA, 101 bp, synthetic construct
  misc_feature 1..101: note = Synthetic
  source 1..101: mol_type = other DNA
tttgcagtcctctcagcatagcactcaatgcggtcggtgtttatcttgctaccaacgacaacccaagcccctcctcgtagctctgcagccatgggaatgta

SEQ ID NO: 414 - DNA, 101 bp, synthetic construct
  misc_feature 1..101: note = Synthetic
  source 1..101: mol_type = other DNA
tttgcagtcctctcagcatagcactcaatgcggtcggtgtttatcttgctgccaacgacaacccaagcccctcctcgtagctctgcagccatgggaatgta

SEQ ID NO: 415 - DNA, 101 bp, synthetic construct
  misc_feature 1..101: note = Synthetic
  source 1..101: mol_type = other DNA
tttgcagtcctctcagcatagcactcaatgcggtcggtgtttatcttgctcccaacgacaacccaagcccctcctcgtagctctgcagccatgggaatgta

SEQ ID NO: 416 - DNA, 101 bp, synthetic construct
  misc_feature 1..101: note = Synthetic
  source 1..101: mol_type = other DNA
tttgcagtcctctcagcatagcactcaatgcggtctgtgtttatcttgctatcaacgacaacccaagcccctcctcgtagctctgcagccatgggaatgta

SEQ ID NO: 417 - DNA, 101 bp, synthetic construct
  misc_feature 1..101: note = Synthetic
  source 1..101: mol_type = other DNA
tttgcagtcctctcagcatagcactcaatgcggtccgtgtttatcttgctatcaacgacaacccaagcccctcctcgtagctctgcagccatgggaatgta

SEQ ID NO: 418 - DNA, 101 bp, synthetic construct
  misc_feature 1..101: note = Synthetic
  source 1..101: mol_type = other DNA
tttgcagtcctctcagcatagcactcaatgcggtcagtgtttatcttgctatcaacgacaacccaagcccctcctcgtagctctgcagccatgggaatgta

SEQ ID NO: 419 - DNA, 101 bp, synthetic construct
  misc_feature 1..101: note = Synthetic
  source 1..101: mol_type = other DNA
tttgcagtcctctcagcatagcactcaatgcggtcggtgtttatcttgctatcaacgacaacccaagcccctcctcgtagctctgcagccatgggaatgta

SEQ ID NO: 420 - DNA, 201 bp, synthetic construct
  misc_feature 1..201: note = Synthetic
  source 1..201: mol_type = other DNA
ctgacctgaacttgatctcaattaacccttgcggttccagaacattgccttttgcagtcctctcagcatagcactcaatgcggtctgggtttatcttgcttccaacgacaacccaagcccctcctcgtagctctgcagccatgggaatgtagacaaaggcaggctgattgtatgtcctaaggttctcaacaatagtcgagc

SEQ ID NO: 421 - DNA, 201 bp, synthetic construct
  misc_feature 1..201: note = Synthetic
  source 1..201: mol_type = other DNA
ctgacctgaacttgatctcaattaacccttgcggttccagaacattgccttttgcagtcctctcagcatagcactcaatgcggtctgggtttatcttgctaccaacgacaacccaagcccctcctcgtagctctgcagccatgggaatgtagacaaaggcaggctgattgtatgtcctaaggttctcaacaatagtcgagc

SEQ ID NO: 422 - DNA, 201 bp, synthetic construct
  misc_feature 1..201: note = Synthetic
  source 1..201: mol_type = other DNA
ctgacctgaacttgatctcaattaacccttgcggttccagaacattgccttttgcagtcctctcagcatagcactcaatgcggtctgggtttatcttgctgccaacgacaacccaagcccctcctcgtagctctgcagccatgggaatgtagacaaaggcaggctgattgtatgtcctaaggttctcaacaatagtcgagc

SEQ ID NO: 423 - DNA, 201 bp, synthetic construct
  misc_feature 1..201: note = Synthetic
  source 1..201: mol_type = other DNA
ctgacctgaacttgatctcaattaacccttgcggttccagaacattgccttttgcagtcctctcagcatagcactcaatgcggtctgggtttatcttgctcccaacgacaacccaagcccctcctcgtagctctgcagccatgggaatgtagacaaaggcaggctgattgtatgtcctaaggttctcaacaatagtcgagc

SEQ ID NO: 424 - DNA, 201 bp, synthetic construct
  misc_feature 1..201: note = Synthetic
  source 1..201: mol_type = other DNA
ctgacctgaacttgatctcaattaacccttgcggttccagaacattgccttttgcagtcctctcagcatagcactcaatgcggtctgtgtttatcttgcttccaacgacaacccaagcccctcctcgtagctctgcagccatgggaatgtagacaaaggcaggctgattgtatgtcctaaggttctcaacaatagtcgagc

SEQ ID NO: 425 - DNA, 201 bp, synthetic construct
  misc_feature 1..201: note = Synthetic
  source 1..201: mol_type = other DNA
ctgacctgaacttgatctcaattaacccttgcggttccagaacattgccttttgcagtcctctcagcatagcactcaatgcggtctgtgtttatcttgctaccaacgacaacccaagcccctcctcgtagctctgcagccatgggaatgtagacaaaggcaggctgattgtatgtcctaaggttctcaacaatagtcgagc

SEQ ID NO: 426 - DNA, 201 bp, synthetic construct
  misc_feature 1..201: note = Synthetic
  source 1..201: mol_type = other DNA
ctgacctgaacttgatctcaattaacccttgcggttccagaacattgccttttgcagtcctctcagcatagcactcaatgcggtctgtgtttatcttgctgccaacgacaacccaagcccctcctcgtagctctgcagccatgggaatgtagacaaaggcaggctgattgtatgtcctaaggttctcaacaatagtcgagc

SEQ ID NO: 427 - DNA, 201 bp, synthetic construct
  misc_feature 1..201: note = Synthetic
  source 1..201: mol_type = other DNA
ctgacctgaacttgatctcaattaacccttgcggttccagaacattgccttttgcagtcctctcagcatagcactcaatgcggtctgtgtttatcttgctcccaacgacaacccaagcccctcctcgtagctctgcagccatgggaatgtagacaaaggcaggctgattgtatgtcctaaggttctcaacaatagtcgagc

SEQ ID NO: 428 - DNA, 201 bp, synthetic construct
  misc_feature 1..201: note = Synthetic
  source 1..201: mol_type = other DNA
ctgacctgaacttgatctcaattaacccttgcggttccagaacattgccttttgcagtcctctcagcatagcactcaatgcggtccgtgtttatcttgcttccaacgacaacccaagcccctcctcgtagctctgcagccatgggaatgtagacaaaggcaggctgattgtatgtcctaaggttctcaacaatagtcgagc

SEQ ID NO: 429 - DNA, 201 bp, synthetic construct
  misc_feature 1..201: note = Synthetic
  source 1..201: mol_type = other DNA
ctgacctgaacttgatctcaattaacccttgcggttccagaacattgccttttgcagtcctctcagcatagcactcaatgcggtccgtgtttatcttgctaccaacgacaacccaagcccctcctcgtagctctgcagccatgggaatgtagacaaaggcaggctgattgtatgtcctaaggttctcaacaatagtcgagc

SEQ ID NO: 430 - DNA, 201 bp, synthetic construct
  misc_feature 1..201: note = Synthetic
  source 1..201: mol_type = other DNA
ctgacctgaacttgatctcaattaacccttgcggttccagaacattgccttttgcagtcctctcagcatagcactcaatgcggtccgtgtttatcttgctgccaacgacaacccaagcccctcctcgtagctctgcagccatgggaatgtagacaaaggcaggctgattgtatgtcctaaggttctcaacaatagtcgagc

SEQ ID NO: 431 - DNA, 201 bp, synthetic construct
  misc_feature 1..201: note = Synthetic
  source 1..201: mol_type = other DNA
ctgacctgaacttgatctcaattaacccttgcggttccagaacattgccttttgcagtcctctcagcatagcactcaatgcggtccgtgtttatcttgctcccaacgacaacccaagcccctcctcgtagctctgcagccatgggaatgtagacaaaggcaggctgattgtatgtcctaaggttctcaacaatagtcgagc

SEQ ID NO: 432 - DNA, 201 bp, synthetic construct
  misc_feature 1..201: note = Synthetic
  source 1..201: mol_type = other DNA
ctgacctgaacttgatctcaattaacccttgcggttccagaacattgccttttgcagtcctctcagcatagcactcaatgcggtcagtgtttatcttgcttccaacgacaacccaagcccctcctcgtagctctgcagccatgggaatgtagacaaaggcaggctgattgtatgtcctaaggttctcaacaatagtcgagc

SEQ ID NO: 433 - DNA, 201 bp, synthetic construct
  misc_feature 1..201: note = Synthetic
  source 1..201: mol_type = other DNA
ctgacctgaacttgatctcaattaacccttgcggttccagaacattgccttttgcagtcctctcagcatagcactcaatgcggtcagtgtttatcttgctaccaacgacaacccaagcccctcctcgtagctctgcagccatgggaatgtagacaaaggcaggctgattgtatgtcctaaggttctcaacaatagtcgagc

SEQ ID NO: 434 - DNA, 201 bp, synthetic construct
  misc_feature 1..201: note = Synthetic
  source 1..201: mol_type = other DNA
ctgacctgaacttgatctcaattaacccttgcggttccagaacattgccttttgcagtcctctcagcatagcactcaatgcggtcagtgtttatcttgctgccaacgacaacccaagcccctcctcgtagctctgcagccatgggaatgtagacaaaggcaggctgattgtatgtcctaaggttctcaacaatagtcgagc

SEQ ID NO: 435 - DNA, 201 bp, synthetic construct
  misc_feature 1..201: note = Synthetic
  source 1..201: mol_type = other DNA
ctgacctgaacttgatctcaattaacccttgcggttccagaacattgccttttgcagtcctctcagcatagcactcaatgcggtcagtgtttatcttgctcccaacgacaacccaagcccctcctcgtagctctgcagccatgggaatgtagacaaaggcaggctgattgtatgtcctaaggttctcaacaatagtcgagc

SEQ ID NO: 436 - DNA, 201 bp, synthetic construct
  misc_feature 1..201: note = Synthetic
  source 1..201: mol_type = other DNA
ctgacctgaacttgatctcaattaacccttgcggttccagaacattgccttttgcagtcctctcagcatagcactcaatgcggtcggtgtttatcttgcttccaacgacaacccaagcccctcctcgtagctctgcagccatgggaatgtagacaaaggcaggctgattgtatgtcctaaggttctcaacaatagtcgagc

SEQ ID NO: 437 - DNA, 201 bp, synthetic construct
  misc_feature 1..201: note = Synthetic
  source 1..201: mol_type = other DNA
ctgacctgaacttgatctcaattaacccttgcggttccagaacattgccttttgcagtcctctcagcatagcactcaatgcggtcggtgtttatcttgctaccaacgacaacccaagcccctcctcgtagctctgcagccatgggaatgtagacaaaggcaggctgattgtatgtcctaaggttctcaacaatagtcgagc

SEQ ID NO: 438 - DNA, 201 bp, synthetic construct
  misc_feature 1..201: note = Synthetic
  source 1..201: mol_type = other DNA
ctgacctgaacttgatctcaattaacccttgcggttccagaacattgccttttgcagtcctctcagcatagcactcaatgcggtcggtgtttatcttgctgccaacgacaacccaagcccctcctcgtagctctgcagccatgggaatgtagacaaaggcaggctgattgtatgtcctaaggttctcaacaatagtcgagc

SEQ ID NO: 439 - DNA, 201 bp, synthetic construct
  misc_feature 1..201: note = Synthetic
  source 1..201: mol_type = other DNA
ctgacctgaacttgatctcaattaacccttgcggttccagaacattgccttttgcagtcctctcagcatagcactcaatgcggtcggtgtttatcttgctcccaacgacaacccaagcccctcctcgtagctctgcagccatgggaatgtagacaaaggcaggctgattgtatgtcctaaggttctcaacaatagtcgagc

SEQ ID NO: 440 - DNA, 201 bp, synthetic construct
  misc_feature 1..201: note = Synthetic
  source 1..201: mol_type = other DNA
ctgacctgaacttgatctcaattaacccttgcggttccagaacattgccttttgcagtcctctcagcatagcactcaatgcggtctgtgtttatcttgctatcaacgacaacccaagcccctcctcgtagctctgcagccatgggaatgtagacaaaggcaggctgattgtatgtcctaaggttctcaacaatagtcgagc

SEQ ID NO: 441 - DNA, 201 bp, synthetic construct
  misc_feature 1..201: note = Synthetic
  source 1..201: mol_type = other DNA
ctgacctgaacttgatctcaattaacccttgcggttccagaacattgccttttgcagtcctctcagcatagcactcaatgcggtccgtgtttatcttgctatcaacgacaacccaagcccctcctcgtagctctgcagccatgggaatgtagacaaaggcaggctgattgtatgtcctaaggttctcaacaatagtcgagc

SEQ ID NO: 442 - DNA, 201 bp, synthetic construct
  misc_feature 1..201: note = Synthetic
  source 1..201: mol_type = other DNA
ctgacctgaacttgatctcaattaacccttgcggttccagaacattgccttttgcagtcctctcagcatagcactcaatgcggtcagtgtttatcttgctatcaacgacaacccaagcccctcctcgtagctctgcagccatgggaatgtagacaaaggcaggctgattgtatgtcctaaggttctcaacaatagtcgagc

SEQ ID NO: 443 - DNA, 201 bp, synthetic construct
  misc_feature 1..201: note = Synthetic
  source 1..201: mol_type = other DNA
ctgacctgaacttgatctcaattaacccttgcggttccagaacattgccttttgcagtcctctcagcatagcactcaatgcggtcggtgtttatcttgctatcaacgacaacccaagcccctcctcgtagctctgcagccatgggaatgtagacaaaggcaggctgattgtatgtcctaaggttctcaacaatagtcgagc

SEQ ID NO: 444 - DNA, 20 bp, synthetic construct
  misc_feature 1..20: note = Synthetic
  source 1..20: mol_type = other DNA
ggttgatcgagatcaagttc

SEQ ID NO: 445 - DNA, 20 bp, synthetic construct
  misc_feature 1..20: note = Synthetic
  source 1..20: mol_type = other DNA
ttgatctcgatcaacccttg

SEQ ID NO: 446 - DNA, 20 bp, synthetic construct
  misc_feature 1..20: note = Synthetic
  source 1..20: mol_type = other DNA
gcaatgttctcgaacctcaa

SEQ ID NO: 447 - DNA, 20 bp, synthetic construct
  misc_feature 1..20: note = Synthetic
  source 1..20: mol_type = other DNA
ggcaatgttctcgaacctca

SEQ ID NO: 448 - DNA, 20 bp, synthetic construct
  misc_feature 1..20: note = Synthetic
  source 1..20: mol_type = other DNA
tatgctgagaggactgcaaa

SEQ ID NO: 449 - DNA, 20 bp, synthetic construct
  misc_feature 1..20: note = Synthetic
  source 1..20: mol_type = other DNA
ctatgctgagaggactgcaa

SEQ ID NO: 450 - DNA, 20 bp, synthetic construct
  misc_feature 1..20: note = Synthetic
  source 1..20: mol_type = other DNA
gcattgagttctatgctgag

SEQ ID NO: 451 - DNA, 20 bp, synthetic construct
  misc_feature 1..20: note = Synthetic
  source 1..20: mol_type = other DNA
gcatagaactcaatgcgatc

SEQ ID NO: 452 - DNA, 20 bp, synthetic construct
  misc_feature 1..20: note = Synthetic
  source 1..20: mol_type = other DNA
agagctacgtggaggggctt

SEQ ID NO: 453 - DNA, 20 bp, synthetic construct
  misc_feature 1..20: note = Synthetic
  source 1..20: mol_type = other DNA
cagagctacgtggaggggct

SEQ ID NO: 454 - DNA, 20 bp, synthetic construct
  misc_feature 1..20: note = Synthetic
  source 1..20: mol_type = other DNA
ggctgcagagctacgtggag

SEQ ID NO: 455 - DNA, 20 bp, synthetic construct
  misc_feature 1..20: note = Synthetic
  source 1..20: mol_type = other DNA
aggctgcagagctacgtgga

SEQ ID NO: 456 - DNA, 20 bp, synthetic construct
  misc_feature 1..20: note = Synthetic
  source 1..20: mol_type = other DNA
aaggctgcagagctacgtgg

SEQ ID NO: 457 - DNA, 20 bp, synthetic construct
  misc_feature 1..20: note = Synthetic
  source 1..20: mol_type = other DNA
tccacgtagctctgcagcct

SEQ ID NO: 458 - DNA, 20 bp, synthetic construct
  misc_feature 1..20: note = Synthetic
  source 1..20: mol_type = other DNA
cccaaggctgcagagctacg

SEQ ID NO: 459 - DNA, 20 bp, synthetic construct
  misc_feature 1..20: note = Synthetic
  source 1..20: mol_type = other DNA
ccacgtagctctgcagcctt

SEQ ID NO: 460 - DNA, 20 bp, synthetic construct
  misc_feature 1..20: note = Synthetic
  source 1..20: mol_type = other DNA
cacgtagctctgcagccttg

SEQ ID NO: 461 - DNA, 20 bp, synthetic construct
  misc_feature 1..20: note = Synthetic
  source 1..20: mol_type = other DNA
agccttggggatatatacaa

SEQ ID NO: 462 - DNA, 20 bp, synthetic construct
  misc_feature 1..20: note = Synthetic
  source 1..20: mol_type = other DNA
tgcctttgtatatatcccca

SEQ ID NO: 463 - DNA, 20 bp, synthetic construct
  misc_feature 1..20: note = Synthetic
  source 1..20: mol_type = other DNA
ttggggatatatacaaaggc

SEQ ID NO: 464 - DNA, 20 bp, synthetic construct
  misc_feature 1..20: note = Synthetic
  source 1..20: mol_type = other DNA
caggctgattgtatgtccta

SEQ ID NO: 465 - DNA, 20 bp, synthetic construct
  misc_feature 1..20: note = Synthetic
  source 1..20: mol_type = other DNA
caacaattgttgagaacctt

SEQ ID NO: 466 - DNA, 24 bp, synthetic construct
  misc_feature 1..24: note = Synthetic
  source 1..24: mol_type = other DNA
cagtcctctcagcatagaactcaa

SEQ ID NO: 467 - DNA, 24 bp, synthetic construct
  misc_feature 1..24: note = Synthetic
  source 1..24: mol_type = other DNA
tcttgctatcaatcacgacccaag

SEQ ID NO: 468 - DNA, 24 bp, synthetic construct
  misc_feature 1..24: note = Synthetic
  source 1..24: mol_type = other DNA
tatatatccccaaggctgcagagc

SEQ ID NO: 469 - DNA, 20 bp, synthetic construct
  misc_feature 1..20: note = Synthetic
  source 1..20: mol_type = other DNA
gaacttgatctcgatcaacc

SEQ ID NO: 470 - DNA, 20 bp, synthetic construct
  misc_feature 1..20: note = Synthetic
  source 1..20: mol_type = other DNA
caagggttgatcgagatcaa

SEQ ID NO: 471 - DNA, 20 bp, synthetic construct
  misc_feature 1..20: note = Synthetic
  source 1..20: mol_type = other DNA
ttgaggttcgagaacattgc

SEQ ID NO: 472 - DNA, 20 bp, synthetic construct
  misc_feature 1..20: note = Synthetic
  source 1..20: mol_type = other DNA
tgaggttcgagaacattgcc

SEQ ID NO: 473 - DNA, 20 bp, synthetic construct
  misc_feature 1..20: note = Synthetic
  source 1..20: mol_type = other DNA
tttgcagtcctctcagcata

SEQ ID NO: 474 - DNA, 20 bp, synthetic construct
  misc_feature 1..20: note = Synthetic
  source 1..20: mol_type = other DNA
ttgcagtcctctcagcatag

SEQ ID NO: 475 - DNA, 20 bp, synthetic construct
  misc_feature 1..20: note = Synthetic
  source 1..20: mol_type = other DNA
ctcagcatagaactcaatgc

SEQ ID NO: 476 - DNA, 20 bp, synthetic construct
  misc_feature 1..20: note = Synthetic
  source 1..20: mol_type = other DNA
gatcgcattgagttctatgc

SEQ ID NO: 477 - DNA, 20 bp, synthetic construct
  misc_feature 1..20: note = Synthetic
  source 1..20: mol_type = other DNA
aagcccctccacgtagctct

SEQ ID NO: 478 - DNA, 20 bp, synthetic construct
  misc_feature 1..20: note = Synthetic
  source 1..20: mol_type = other DNA
agcccctccacgtagctctg

SEQ ID NO: 479 - DNA, 20 bp, synthetic construct
  misc_feature 1..20: note = Synthetic
  source 1..20: mol_type = other DNA
ctccacgtagctctgcagcc

SEQ ID NO: 480 - DNA, 20 bp, synthetic construct
  misc_feature 1..20: note = Synthetic
  source 1..20: mol_type = other DNA
tccacgtagctctgcagcct

SEQ ID NO: 481 - DNA, 20 bp, synthetic construct
  misc_feature 1..20: note = Synthetic
  source 1..20: mol_type = other DNA
ccacgtagctctgcagcctt

SEQ ID NO: 482 - DNA, 20 bp, synthetic construct
  misc_feature 1..20: note = Synthetic
  source 1..20: mol_type = other DNA
aggctgcagagctacgtgga

SEQ ID NO: 483 - DNA, 20 bp, synthetic construct
  misc_feature 1..20: note = Synthetic
  source 1..20: mol_type = other DNA
cgtagctctgcagccttggg

SEQ ID NO: 484 - DNA, 20 bp, synthetic construct
  misc_feature 1..20: note = Synthetic
  source 1..20: mol_type = other DNA
aaggctgcagagctacgtgg

SEQ ID NO: 485 - DNA, 20 bp, synthetic construct
  misc_feature 1..20: note = Synthetic
  source 1..20: mol_type = other DNA
caaggctgcagagctacgtg

SEQ ID NO: 486 - DNA, 20 bp, synthetic construct
  misc_feature 1..20: note = Synthetic
  source 1..20: mol_type = other DNA
ttgtatatatccccaaggct

SEQ ID NO: 487 - DNA, 20 bp, synthetic construct
  misc_feature 1..20: note = Synthetic
  source 1..20: mol_type = other DNA
tggggatatatacaaaggca

SEQ ID NO: 488 - DNA, 20 bp, synthetic construct
  misc_feature 1..20: note = Synthetic
  source 1..20: mol_type = other DNA
gcctttgtatatatccccaa

SEQ ID NO: 489 - DNA, 20 bp, synthetic construct
  misc_feature 1..20: note = Synthetic
  source 1..20: mol_type = other DNA
taggacatacaatcagcctg

SEQ ID NO: 490 - DNA, 20 bp, synthetic construct
  misc_feature 1..20: note = Synthetic
  source 1..20: mol_type = other DNA
aaggttctcaacaattgttg

SEQ ID NO: 491 - DNA, 24 bp, synthetic construct
  misc_feature 1..24: note = Synthetic
  source 1..24: mol_type = other DNA
ttgagttctatgctgagaggactg

SEQ ID NO: 492 - DNA, 24 bp, synthetic construct
  misc_feature 1..24: note = Synthetic
  source 1..24: mol_type = other DNA
cttgggtcgtgattgatagcaaga

SEQ ID NO: 493 - DNA, 24 bp, synthetic construct
  misc_feature 1..24: note = Synthetic
  source 1..24: mol_type = other DNA
gctctgcagccttggggatatata

SEQ ID NO: 494 - DNA, 101 bp, synthetic construct
  misc_feature 1..101: note = Synthetic
  source 1..101: mol_type = other DNA
tatatccccaaggctgcagagctacgtggaggggcttgggtcgtgattggtagcaagataaatccagatcgcattgagttctatgctgagaggactgcaaa

SEQ ID NO: 495 - DNA, 101 bp, synthetic construct
  misc_feature 1..101: note = Synthetic
  source 1..101: mol_type = other DNA
tatatccccaaggctgcagagctacgtggaggggcttgggtcgtgattggcagcaagataaatccagatcgcattgagttctatgctgagaggactgcaaa

SEQ ID NO: 496 - DNA, 101 bp, synthetic construct
  misc_feature 1..101: note = Synthetic
  source 1..101: mol_type = other DNA
tatatccccaaggctgcagagctacgtggaggggcttgggtcgtgattggaagcaagataaatccagatcgcattgagttctatgctgagaggactgcaaa

SEQ ID NO: 497 - DNA, 101 bp, synthetic construct
  misc_feature 1..101: note = Synthetic
  source 1..101: mol_type = other DNA
tatatccccaaggctgcagagctacgtggaggggcttgggtcgtgattgggagcaagataaatccagatcgcattgagttctatgctgagaggactgcaaa

SEQ ID NO: 498 - DNA, 101 bp, synthetic construct
  misc_feature 1..101: note = Synthetic
  source 1..101: mol_type = other DNA
tatatccccaaggctgcagagctacgtggaggggcttgggtcgtgattgatagcaagataaatactgatcgcattgagttctatgctgagaggactgcaaa

SEQ ID NO: 499 - DNA, 101 bp, synthetic construct
  misc_feature 1..101: note = Synthetic
  source 1..101: mol_type = other DNA
tatatccccaaggctgcagagctacgtggaggggcttgggtcgtgattgatagcaagataaataccgatcgcattgagttctatgctgagaggactgcaaa

SEQ ID NO: 500 - DNA, 101 bp, synthetic construct
  misc_feature 1..101: note = Synthetic
  source 1..101: mol_type = other DNA
tatatccccaaggctgcagagctacgtggaggggcttgggtcgtgattgatagcaagataaatacagatcgcattgagttctatgctgagaggactgcaaa

SEQ ID NO: 501 - DNA, 101 bp, synthetic construct
  misc_feature 1..101: note = Synthetic
  source 1..101: mol_type = other DNA
tatatccccaaggctgcagagctacgtggaggggcttgggtcgtgattgatagcaagataaatacggatcgcattgagttctatgctgagaggactgcaaa

SEQ ID NO: 502 - DNA, 101 bp, synthetic construct
  misc_feature 1..101: note = Synthetic
  source 1..101: mol_type = other DNA
tatatccccaaggctgcagagctacgtggaggggcttgggtcgtgattggtagcaagataaatactgatcgcattgagttctatgctgagaggactgcaaa

SEQ ID NO: 503 - DNA, 101 bp, synthetic construct
  misc_feature 1..101: note = Synthetic
  source 1..101: mol_type = other DNA
tatatccccaaggctgcagagctacgtggaggggcttgggtcgtgattggcagcaagataaatactgatcgcattgagttctatgctgagaggactgcaaa

SEQ ID NO: 504 - DNA, 101 bp, synthetic construct
  misc_feature 1..101: note = Synthetic
  source 1..101: mol_type = other DNA
tatatccccaaggctgcagagctacgtggaggggcttgggtcgtgattggaagcaagataaatactgatcgcattgagttctatgctgagaggactgcaaa

SEQ ID NO: 505 - DNA, 101 bp, synthetic construct
  misc_feature 1..101: note = Synthetic
  source 1..101: mol_type = other DNA
tatatccccaaggctgcagagctacgtggaggggcttgggtcgtgattgggagcaagataaatactgatcgcattgagttctatgctgagaggactgcaaa

SEQ ID NO: 506 - DNA, 101 bp, synthetic construct
  misc_feature 1..101: note = Synthetic
  source 1..101: mol_type = other DNA
tatatccccaaggctgcagagctacgtggaggggcttgggtcgtgattggtagcaagataaataccgatcgcattgagttctatgctgagaggactgcaaa

SEQ ID NO: 507 - DNA, 101 bp, synthetic construct
  misc_feature 1..101: note = Synthetic
  source 1..101: mol_type = other DNA
tatatccccaaggctgcagagctacgtggaggggcttgggtcgtgattggcagcaagataaataccgatcgcattgagttctatgctgagaggactgcaaa

SEQ ID NO: 508 - DNA, 101 bp, synthetic construct
  misc_feature 1..101: note = Synthetic
  source 1..101: mol_type = other DNA
tatatccccaaggctgcagagctacgtggaggggcttgggtcgtgattggaagcaagataaataccgatcgcattgagttctatgctgagaggactgcaaa

SEQ ID NO: 509 - DNA, 101 bp, synthetic construct
  misc_feature 1..101: note = Synthetic
  source 1..101: mol_type = other DNA
tatatccccaaggctgcagagctacgtggaggggcttgggtcgtgattgggagcaagataaataccgatcgcattgagttctatgctgagaggactgcaaa

SEQ ID NO: 510 - DNA, 101 bp, synthetic construct
  misc_feature 1..101: note = Synthetic
  source 1..101: mol_type = other DNA
tatatccccaaggctgcagagctacgtggaggggcttgggtcgtgattggtagcaagataaatacagatcgcattgagttctatgctgagaggactgcaaa

SEQ ID NO: 511 - DNA, 101 bp, synthetic construct
  misc_feature 1..101: note = Synthetic
  source 1..101: mol_type = other DNA
tatatccccaaggctgcagagctacgtggaggggcttgggtcgtgattggcagcaagataaatacagatcgcattgagttctatgctgagaggactgcaaa

SEQ ID NO: 512 - DNA, 101 bp, synthetic construct
  misc_feature 1..101: note = Synthetic
  source 1..101: mol_type = other DNA
tatatccccaaggctgcagagctacgtggaggggcttgggtcgtgattggaagcaagataaatacagatcgcattgagttctatgctgagaggactgcaaa

SEQ ID NO: 513 - DNA, 101 bp, synthetic construct
  misc_feature 1..101: note = Synthetic
  source 1..101: mol_type = other DNA
tatatccccaaggctgcagagctacgtggaggggcttgggtcgtgattgggagcaagataaatacagatcgcattgagttctatgctgagaggactgcaaa

SEQ ID NO: 514 - DNA, 101 bp, synthetic construct
  misc_feature 1..101: note = Synthetic
  source 1..101: mol_type = other DNA
tatatccccaaggctgcagagctacgtggaggggcttgggtcgtgattggtagcaagataaatacggatcgcattgagttctatgctgagaggactgcaaa

SEQ ID NO: 515 - DNA, 101 bp, synthetic construct
  misc_feature 1..101: note = Synthetic
  source 1..101: mol_type = other DNA
tatatccccaaggctgcagagctacgtggaggggcttgggtcgtgattggcagcaagataaatacggatcgcattgagttctatgctgagaggactgcaaa

SEQ ID NO: 516 - DNA, 101 bp, synthetic construct
  misc_feature 1..101: note = Synthetic
  source 1..101: mol_type = other DNA
tatatccccaaggctgcagagctacgtggaggggcttgggtcgtgattggaagcaagataaatacggatcgcattgagttctatgctgagaggactgcaaa

SEQ ID NO: 517 - DNA, 101 bp, synthetic construct
  misc_feature 1..101: note = Synthetic
  source 1..101: mol_type = other DNA
tatatccccaaggctgcagagctacgtggaggggcttgggtcgtgattgggagcaagataaatacggatcgcattgagttctatgctgagaggactgcaaa

SEQ ID NO: 518 - DNA, 201 bp, synthetic construct
  misc_feature 1..201: note = Synthetic
  source 1..201: mol_type = other DNA
ggtcaacaattgttgagaaccttaggacatacaatcagcctgcctttgtatatatccccaaggctgcagagctacgtggaggggcttgggtcgtgattggtagcaagataaatccagatcgcattgagttctatgctgagaggactgcaaagggcaatgttctcgaacctcaagggttgatcgagatcaagttcaggtcag

SEQ ID NO: 519 - DNA, 201 bp, synthetic construct
  misc_feature 1..201: note = Synthetic
  source 1..201: mol_type = other DNA
ggtcaacaattgttgagaaccttaggacatacaatcagcctgcctttgtatatatccccaaggctgcagagctacgtggaggggcttgggtcgtgattggcagcaagataaatccagatcgcattgagttctatgctgagaggactgcaaagggcaatgttctcgaacctcaagggttgatcgagatcaagttcaggtcag

SEQ ID NO: 520 - DNA, 201 bp, synthetic construct
  misc_feature 1..201: note = Synthetic
  source 1..201: mol_type = other DNA
ggtcaacaattgttgagaaccttaggacatacaatcagcctgcctttgtatatatccccaaggctgcagagctacgtggaggggcttgggtcgtgattggaagcaagataaatccagatcgcattgagttctatgctgagaggactgcaaagggcaatgttctcgaacctcaagggttgatcgagatcaagttcaggtcag

SEQ ID NO: 521 - DNA, 201 bp, synthetic construct
  misc_feature 1..201: note = Synthetic
  source 1..201: mol_type = other DNA
ggtcaacaattgttgagaaccttaggacatacaatcagcctgcctttgtatatatccccaaggctgcagagctacgtggaggggcttgggtcgtgattgggagcaagataaatccagatcgcattgagttctatgctgagaggactgcaaagggcaatgttctcgaacctcaagggttgatcgagatcaagttcaggtcag

SEQ ID NO: 522 - DNA, 201 bp, synthetic construct
  misc_feature 1..201: note = Synthetic
  source 1..201: mol_type = other DNA
ggtcaacaattgttgagaaccttaggacatacaatcagcctgcctttgtatatatccccaaggctgcagagctacgtggaggggcttgggtcgtgattgatagcaagataaatactgatcgcattgagttctatgctgagaggactgcaaagggcaatgttctcgaacctcaagggttgatcgagatcaagttcaggtcag

SEQ ID NO: 523 - DNA, 201 bp, synthetic construct
  misc_feature 1..201: note = Synthetic
  source 1..201: mol_type = other DNA
ggtcaacaattgttgagaaccttaggacatacaatcagcctgcctttgtatatatccccaaggctgcagagctacgtggaggggcttgggtcgtgattgatagcaagataaataccgatcgcattgagttctatgctgagaggactgcaaagggcaatgttctcgaacctcaagggttgatcgagatcaagttcaggtcag

SEQ ID NO: 524 - DNA, 201 bp, synthetic construct
  misc_feature 1..201: note = Synthetic
  source 1..201: mol_type = other DNA
ggtcaacaattgttgagaaccttaggacatacaatcagcctgcctttgtatatatccccaaggctgcagagctacgtggaggggcttgggtcgtgattgatagcaagataaatacagatcgcattgagttctatgctgagaggactgcaaagggcaatgttctcgaacctcaagggttgatcgagatcaagttcaggtcag

SEQ ID NO: 525 - DNA, 201 bp, synthetic construct
  misc_feature 1..201: note = Synthetic
  source 1..201: mol_type = other DNA
ggtcaacaattgttgagaaccttaggacatacaatcagcctgcctttgtatatatccccaaggctgcagagctacgtggaggggcttgggtcgtgattgatagcaagataaatacggatcgcattgagttctatgctgagaggactgcaaagggcaatgttctcgaacctcaagggttgatcgagatcaagttcaggtcag

SEQ ID NO: 526 - DNA, 201 bp, synthetic construct
  misc_feature 1..201: note = Synthetic
  source 1..201: mol_type = other DNA
ggtcaacaattgttgagaaccttaggacatacaatcagcctgcctttgtatatatccccaaggctgcagagctacgtggaggggcttgggtcgtgattggtagcaagataaatactgatcgcattgagttctatgctgagaggactgcaaagggcaatgttctcgaacctcaagggttgatcgagatcaagttcaggtcag

SEQ ID NO: 527 - DNA, 201 bp, synthetic construct
  misc_feature 1..201: note = Synthetic
  source 1..201: mol_type = other DNA
ggtcaacaattgttgagaaccttaggacatacaatcagcctgcctttgtatatatccccaaggctgcagagctacgtggaggggcttgggtcgtgattggcagcaagataaatactgatcgcattgagttctatgctgagaggactgcaaagggcaatgttctcgaacctcaagggttgatcgagatcaagttcaggtcag

SEQ ID NO: 528 - DNA, 201 bp, synthetic construct
  misc_feature 1..201: note = Synthetic
  source 1..201: mol_type = other DNA
ggtcaacaattgttgagaaccttaggacatacaatcagcctgcctttgtatatatccccaaggctgcagagctacgtggaggggcttgggtcgtgattggaagcaagataaatactgatcgcattgagttctatgctgagaggactgcaaagggcaatgttctcgaacctcaagggttgatcgagatcaagttcaggtcag

SEQ ID NO: 529 - DNA, 201 bp, synthetic construct
  misc_feature 1..201: note = Synthetic
  source 1..201: mol_type = other DNA
ggtcaacaattgttgagaaccttaggacatacaatcagcctgcctttgtatatatccccaaggctgcagagctacgtggaggggcttgggtcgtgattgggagcaagataaatactgatcgcattgagttctatgctgagaggactgcaaagggcaatgttctcgaacctcaagggttgatcgagatcaagttcaggtcag

SEQ ID NO: 530 - DNA, 201 bp, synthetic construct
  misc_feature 1..201: note = Synthetic
  source 1..201: mol_type = other DNA
ggtcaacaattgttgagaaccttaggacatacaatcagcctgcctttgtatatatccccaaggctgcagagctacgtggaggggcttgggtcgtgattggtagcaagataaataccgatcgcattgagttctatgctgagaggactgcaaagggcaatgttctcgaacctcaagggttgatcgagatcaagttcaggtcag

SEQ ID NO: 531 - DNA, 201 bp, synthetic construct
  misc_feature 1..201: note = Synthetic
  source 1..201: mol_type = other DNA
ggtcaacaattgttgagaaccttaggacatacaatcagcctgcctttgtatatatccccaaggctgcagagctacgtggaggggcttgggtcgtgattggcagcaagataaataccgatcgcattgagttctatgctgagaggactgcaaagggcaatgttctcgaacctcaagggttgatcgagatcaagttcaggtcag

SEQ ID NO: 532 - DNA, 201 bp, synthetic construct
  misc_feature 1..201: note = Synthetic
  source 1..201: mol_type = other DNA
ggtcaacaattgttgagaaccttaggacatacaatcagcctgcctttgtatatatccccaaggctgcagagctacgtggaggggcttgggtcgtgattggaagcaagataaataccgatcgcattgagttctatgctgagaggactgcaaagggcaatgttctcgaacctcaagggttgatcgagatcaagttcaggtcag

SEQ ID NO: 533 - DNA, 201 bp, synthetic construct
  misc_feature 1..201: note = Synthetic
  source 1..201: mol_type = other DNA
ggtcaacaattgttgagaaccttaggacatacaatcagcctgcctttgtatatatccccaaggctgcagagctacgtggaggggcttgggtcgtgattgggagcaagataaataccgatcgcattgagttctatgctgagaggactgcaaagggcaatgttctcgaacctcaagggttgatcgagatcaagttcaggtcag

SEQ ID NO: 534 - DNA, 201 bp, synthetic construct
  misc_feature 1..201: note = Synthetic
  source 1..201: mol_type = other DNA
ggtcaacaattgttgagaaccttaggacatacaatcagcctgcctttgtatatatccccaaggctgcagagctacgtggaggggcttgggtcgtgattggtagcaagataaatacagatcgcattgagttctatgctgagaggactgcaaagggcaatgttctcgaacctcaagggttgatcgagatcaagttcaggtcag

SEQ ID NO: 535 - DNA, 201 bp, synthetic construct
  misc_feature 1..201: note = Synthetic
  source 1..201: mol_type = other DNA
ggtcaacaattgttgagaaccttaggacatacaatcagcctgcctttgtatatatccccaaggctgcagagctacgtggaggggcttgggtcgtgattggcagcaagataaatacagatcgcattgagttctatgctgagaggactgcaaagggcaatgttctcgaacctcaagggttgatcgagatcaagttcaggtcag

SEQ ID NO: 536 - DNA, 201 bp, synthetic construct
  misc_feature 1..201: note = Synthetic
  source 1..201: mol_type = other DNA
ggtcaacaattgttgagaaccttaggacatacaatcagcctgcctttgtatatatccccaaggctgcagagctacgtggaggggcttgggtcgtgattggaagcaagataaatacagatcgcattgagttctatgctgagaggactgcaaagggcaatgttctcgaacctcaagggttgatcgagatcaagttcaggtcag

SEQ ID NO: 537 - DNA, 201 bp, synthetic construct
  misc_feature 1..201: note = Synthetic
  source 1..201: mol_type = other DNA
ggtcaacaattgttgagaaccttaggacatacaatcagcctgcctttgtatatatccccaaggctgcagagctacgtggaggggcttgggtcgtgattgggagcaagataaatacagatcgcattgagttctatgctgagaggactgcaaagggcaatgttctcgaacctcaagggttgatcgagatcaagttcaggtcag

SEQ ID NO: 538 - DNA, 201 bp, synthetic construct
  misc_feature 1..201: note = Synthetic
  source 1..201: mol_type = other DNA
ggtcaacaattgttgagaaccttaggacatacaatcagcctgcctttgtatatatccccaaggctgcagagctacgtggaggggcttgggtcgtgattggtagcaagataaatacggatcgcattgagttctatgctgagaggactgcaaagggcaatgttctcgaacctcaagggttgatcgagatcaagttcaggtcag

SEQ ID NO: 539 - DNA, 201 bp, synthetic construct
  misc_feature 1..201: note = Synthetic
  source 1..201: mol_type = other DNA
ggtcaacaattgttgagaaccttaggacatacaatcagcctgcctttgtatatatccccaaggctgcagagctacgtggaggggcttgggtcgtgattggcagcaagataaatacggatcgcattgagttctatgctgagaggactgcaaagggcaatgttctcgaacctcaagggttgatcgagatcaagttcaggtcag

SEQ ID NO: 540 - DNA, 201 bp, synthetic construct
  misc_feature 1..201: note = Synthetic
  source 1..201: mol_type = other DNA
ggtcaacaattgttgagaaccttaggacatacaatcagcctgcctttgtatatatccccaaggctgcagagctacgtggaggggcttgggtcgtgattggaagcaagataaatacggatcgcattgagttctatgctgagaggactgcaaagggcaatgttctcgaacctcaagggttgatcgagatcaagttcaggtcag

SEQ ID NO: 541 - DNA, 201 bp, synthetic construct
  misc_feature 1..201: note = Synthetic
  source 1..201: mol_type = other DNA
ggtcaacaattgttgagaaccttaggacatacaatcagcctgcctttgtatatatccccaaggctgcagagctacgtggaggggcttgggtcgtgattgggagcaagataaatacggatcgcattgagttctatgctgagaggactgcaaagggcaatgttctcgaacctcaagggttgatcgagatcaagttcaggtcag

SEQ ID NO: 542 - DNA, 101 bp, synthetic construct
  misc_feature 1..101: note = Synthetic
  source 1..101: mol_type = other DNA
tttgcagtcctctcagcatagaactcaatgcgatctggatttatcttgctaccaatcacgacccaagcccctccacgtagctctgcagccttggggatata

SEQ ID NO: 543 - DNA, 101 bp, synthetic construct
  misc_feature 1..101: note = Synthetic
  source 1..101: mol_type = other DNA
tttgcagtcctctcagcatagaactcaatgcgatctggatttatcttgctgccaatcacgacccaagcccctccacgtagctctgcagccttggggatata

SEQ ID NO: 544 - DNA, 101 bp, synthetic construct
  misc_feature 1..101: note = Synthetic
  source 1..101: mol_type = other DNA
tttgcagtcctctcagcatagaactcaatgcgatctggatttatcttgcttccaatcacgacccaagcccctccacgtagctctgcagccttggggatata

SEQ ID NO: 545 - DNA, 101 bp, synthetic construct
  misc_feature 1..101: note = Synthetic
  source 1..101: mol_type = other DNA
tttgcagtcctctcagcatagaactcaatgcgatctggatttatcttgctcccaatcacgacccaagcccctccacgtagctctgcagccttggggatata

SEQ ID NO: 546 - DNA, 101 bp, synthetic construct
  misc_feature 1..101: note = Synthetic
  source 1..101: mol_type = other DNA
tttgcagtcctctcagcatagaactcaatgcgatcagtatttatcttgctatcaatcacgacccaagcccctccacgtagctctgcagccttggggatata

SEQ ID NO: 547 - DNA, 101 bp, synthetic construct
  misc_feature 1..101: note = Synthetic
  source 1..101: mol_type = other DNA
tttgcagtcctctcagcatagaactcaatgcgatcggtatttatcttgctatcaatcacgacccaagcccctccacgtagctctgcagccttggggatata

SEQ ID NO: 548 - DNA, 101 bp, synthetic construct
  misc_feature 1..101: note = Synthetic
  source 1..101: mol_type = other DNA
tttgcagtcctctcagcatagaactcaatgcgatctgtatttatcttgctatcaatcacgacccaagcccctccacgtagctctgcagccttggggatata

SEQ ID NO: 549 - DNA, 101 bp, synthetic construct
  misc_feature 1..101: note = Synthetic
  source 1..101: mol_type = other DNA
tttgcagtcctctcagcatagaactcaatgcgatccgtatttatcttgctatcaatcacgacccaagcccctccacgtagctctgcagccttggggatata

SEQ ID NO: 550 - DNA, 101 bp, synthetic construct
  misc_feature 1..101: note = Synthetic
  source 1..101: mol_type = other DNA
tttgcagtcctctcagcatagaactcaatgcgatcagtatttatcttgctaccaatcacgacccaagcccctccacgtagctctgcagccttggggatata

SEQ ID NO: 551 - DNA, 101 bp, synthetic construct
  misc_feature 1..101: note = Synthetic
  source 1..101: mol_type = other DNA
tttgcagtcctctcagcatagaactcaatgcgatcagtatttatcttgctgccaatcacgacccaagcccctccacgtagctctgcagccttggggatata

SEQ ID NO: 552 - DNA, 101 bp, synthetic construct
  misc_feature 1..101: note = Synthetic
  source 1..101: mol_type = other DNA
tttgcagtcctctcagcatagaactcaatgcgatcagtatttatcttgcttccaatcacgacccaagcccctccacgtagctctgcagccttggggatata

SEQ ID NO: 553 - DNA, 101 bp, synthetic construct
  misc_feature 1..101: note = Synthetic
  source 1..101: mol_type = other DNA
tttgcagtcctctcagcatagaactcaatgcgatcagtatttatcttgctcccaatcacgacccaagcccctccacgtagctctgcagccttggggatata

SEQ ID NO: 554 - DNA, 101 bp, synthetic construct
  misc_feature 1..101: note = Synthetic
  source 1..101: mol_type = other DNA
tttgcagtcctctcagcatagaactcaatgcgatcggtatttatcttgctaccaatcacgacccaagcccctccacgtagctctgcagccttggggatata

SEQ ID NO: 555 - DNA, 101 bp, synthetic construct
  misc_feature 1..101: note = Synthetic
  source 1..101: mol_type = other DNA
tttgcagtcctctcagcatagaactcaatgcgatcggtatttatcttgctgccaatcacgacccaagcccctccacgtagctctgcagccttggggatata

SEQ ID NO: 556 - DNA, 101 bp, synthetic construct
  misc_feature 1..101: note = Synthetic
  source 1..101: mol_type = other DNA
tttgcagtcctctcagcatagaactcaatgcgatcggtatttatcttgcttccaatcacgacccaagcccctccacgtagctctgcagccttggggatata

SEQ ID NO: 557 - DNA, 101 bp, synthetic construct
  misc_feature 1..101: note = Synthetic
  source 1..101: mol_type = other DNA
tttgcagtcctctcagcatagaactcaatgcgatcggtatttatcttgctcccaatcacgacccaagcccctccacgtagctctgcagccttggggatata

SEQ ID NO: 558 - DNA, 101 bp, synthetic construct
  misc_feature 1..101: note = Synthetic
  source 1..101: mol_type = other DNA
tttgcagtcctctcagcatagaactcaatgcgatctgtatttatcttgctaccaatcacgacccaagcccctccacgtagctctgcagccttggggatata

SEQ ID NO: 559 - DNA, 101 bp, synthetic construct
  misc_feature 1..101: note = Synthetic
  source 1..101: mol_type = other DNA
tttgcagtcctctcagcatagaactcaatgcgatctgtatttatcttgctgccaatcacgacccaagcccctccacgtagctctgcagccttggggatata

SEQ ID NO: 560 - DNA, 101 bp, synthetic construct
  misc_feature 1..101: note = Synthetic
  source 1..101: mol_type = other DNA
tttgcagtcctctcagcatagaactcaatgcgatctgtatttatcttgcttccaatcacgacccaagcccctccacgtagctctgcagccttggggatata

SEQ ID NO: 561 - DNA, 101 bp, synthetic construct
  misc_feature 1..101: note = Synthetic
  source 1..101: mol_type = other DNA
tttgcagtcctctcagcatagaactcaatgcgatctgtatttatcttgctcccaatcacgacccaagcccctccacgtagctctgcagccttggggatata

SEQ ID NO: 562 - DNA, 101 bp, synthetic construct
  misc_feature 1..101: note = Synthetic
  source 1..101: mol_type = other DNA
tttgcagtcctctcagcatagaactcaatgcgatccgtatttatcttgctaccaatcacgacccaagcccctccacgtagctctgcagccttggggatata

SEQ ID NO: 563 - DNA, 101 bp, synthetic construct
  misc_feature 1..101: note = Synthetic
  source 1..101: mol_type = other DNA
tttgcagtcctctcagcatagaactcaatgcgatccgtatttatcttgctgccaatcacgacccaagcccctccacgtagctctgcagccttggggatata

SEQ ID NO: 564 - DNA, 101 bp, synthetic construct
  misc_feature 1..101: note = Synthetic
  source 1..101: mol_type = other DNA
tttgcagtcctctcagcatagaactcaatgcgatccgtatttatcttgcttccaatcacgacccaagcccctccacgtagctctgcagccttggggatata

SEQ ID NO: 565 - DNA, 101 bp, synthetic construct
  misc_feature 1..101: note = Synthetic
  source 1..101: mol_type = other DNA
tttgcagtcctctcagcatagaactcaatgcgatccgtatttatcttgctcccaatcacgacccaagcccctccacgtagctctgcagccttggggatata

SEQ ID NO: 566 - DNA, 201 bp, synthetic construct
  misc_feature 1..201: note = Synthetic
  source 1..201: mol_type = other DNA
ctgacctgaacttgatctcgatcaacccttgaggttcgagaacattgccctttgcagtcctctcagcatagaactcaatgcgatctggatttatcttgctaccaatcacgacccaagcccctccacgtagctctgcagccttggggatatatacaaaggcaggctgattgtatgtcctaaggttctcaacaattgttgacc

SEQ ID NO: 567 - DNA, 201 bp, synthetic construct
  misc_feature 1..201: note = Synthetic
  source 1..201: mol_type = other DNA
ctgacctgaacttgatctcgatcaacccttgaggttcgagaacattgccctttgcagtcctctcagcatagaactcaatgcgatctggatttatcttgctgccaatcacgacccaagcccctccacgtagctctgcagccttggggatatatacaaaggcaggctgattgtatgtcctaaggttctcaacaattgttgacc

SEQ ID NO: 568 - DNA, 201 bp, synthetic construct
  misc_feature 1..201: note = Synthetic
  source 1..201: mol_type = other DNA
ctgacctgaacttgatctcgatcaacccttgaggttcgagaacattgccctttgcagtcctctcagcatagaactcaatgcgatctggatttatcttgcttccaatcacgacccaagcccctccacgtagctctgcagccttggggatatatacaaaggcaggctgattgtatgtcctaaggttctcaacaattgttgacc

SEQ ID NO: 569 - DNA, 201 bp, synthetic construct
  misc_feature 1..201: note = Synthetic
  source 1..201: mol_type = other DNA
ctgacctgaacttgatctcgatcaacccttgaggttcgagaacattgccctttgcagtcctctcagcatagaactcaatgcgatctggatttatcttgctcccaatcacgacccaagcccctccacgtagctctgcagccttggggatatatacaaaggcaggctgattgtatgtcctaaggttctcaacaattgttgacc

SEQ ID NO: 570 - DNA, 201 bp, synthetic construct
  misc_feature 1..201: note = Synthetic
  source 1..201: mol_type = other DNA
ctgacctgaacttgatctcgatcaacccttgaggttcgagaacattgccctttgcagtcctctcagcatagaactcaatgcgatcagtatttatcttgctatcaatcacgacccaagcccctccacgtagctctgcagccttggggatatatacaaaggcaggctgattgtatgtcctaaggttctcaacaattgttgacc

SEQ ID NO: 571 - DNA, 201 bp, synthetic construct
  misc_feature 1..201: note = Synthetic
  source 1..201: mol_type = other DNA
ctgacctgaacttgatctcgatcaacccttgaggttcgagaacattgccctttgcagtcctctcagcatagaactcaatgcgatcggtatttatcttgctatcaatcacgacccaagcccctccacgtagctctgcagccttggggatatatacaaaggcaggctgattgtatgtcctaaggttctcaacaattgttgacc

SEQ ID NO: 572 - DNA, 201 bp, synthetic construct
  misc_feature 1..201: note = Synthetic
  source 1..201: mol_type = other DNA
ctgacctgaacttgatctcgatcaacccttgaggttcgagaacattgccctttgcagtcctctcagcatagaactcaatgcgatctgtatttatcttgctatcaatcacgacccaagcccctccacgtagctctgcagccttggggatatatacaaaggcaggctgattgtatgtcctaaggttctcaacaattgttgacc

SEQ ID NO: 573 - DNA, 201 bp, synthetic construct
  misc_feature 1..201: note = Synthetic
  source 1..201: mol_type = other DNA
ctgacctgaacttgatctcgatcaacccttgaggttcgagaacattgccctttgcagtcctctcagcatagaactcaatgcgatccgtatttatcttgctatcaatcacgacccaagcccctccacgtagctctgcagccttggggatatatacaaaggcaggctgattgtatgtcctaaggttctcaacaattgttgacc

SEQ ID NO: 574 - DNA, 201 bp, synthetic construct
  misc_feature 1..201: note = Synthetic
  source 1..201: mol_type = other DNA
ctgacctgaacttgatctcgatcaacccttgaggttcgagaacattgccctttgcagtcctctcagcatagaactcaatgcgatcagtatttatcttgctaccaatcacgacccaagcccctccacgtagctctgcagccttggggatatatacaaaggcaggctgattgtatgtcctaaggttctcaacaattgttgacc

SEQ ID NO: 575 - DNA, 201 bp, synthetic construct
  misc_feature 1..201: note = Synthetic
  source 1..201: mol_type = other DNA
ctgacctgaacttgatctcgatcaacccttgaggttcgagaacattgccctttgcagtcctctcagcatagaactcaatgcgatcagtatttatcttgctgccaatcacgacccaagcccctccacgtagctctgcagccttggggatatatacaaaggcaggctgattgtatgtcctaaggttctcaacaattgttgacc

SEQ ID NO: 576 - DNA, 201 bp, synthetic construct
  misc_feature 1..201: note = Synthetic
  source 1..201: mol_type = other DNA
ctgacctgaacttgatctcgatcaacccttgaggttcgagaacattgccctttgcagtcctctcagcatagaactcaatgcgatcagtatttatcttgcttccaatcacgacccaagcccctccacgtagctctgcagccttggggatatatacaaaggcaggctgattgtatgtcctaaggttctcaacaattgttgacc

SEQ ID NO: 577 - DNA, 201 bp, synthetic construct
  misc_feature 1..201: note = Synthetic
  source 1..201: mol_type = other DNA
ctgacctgaacttgatctcgatcaacccttgaggttcgagaacattgccctttgcagtcctctcagcatagaactcaatgcgatcagtatttatcttgctcccaatcacgacccaagcccctccacgtagctctgcagccttggggatatatacaaaggcaggctgattgtatgtcctaaggttctcaacaattgttgacc

SEQ ID NO: 578 - DNA, 201 bp, synthetic construct
  misc_feature 1..201: note = Synthetic
  source 1..201: mol_type = other DNA
ctgacctgaacttgatctcgatcaacccttgaggttcgagaacattgccctttgcagtcctctcagcatagaactcaatgcgatcggtatttatcttgctaccaatcacgacccaagcccctccacgtagctctgcagccttggggatatatacaaaggcaggctgattgtatgtcctaaggttctcaacaattgttgacc

SEQ ID NO: 579 - DNA, 201 bp, synthetic construct
  misc_feature 1..201: note = Synthetic
  source 1..201: mol_type = other DNA
ctgacctgaacttgatctcgatcaacccttgaggttcgagaacattgccctttgcagtcctctcagcatagaactcaatgcgatcggtatttatcttgctgccaatcacgacccaagcccctccacgtagctctgcagccttggggatatatacaaaggcaggctgattgtatgtcctaaggttctcaacaattgttgacc

SEQ ID NO: 580 - DNA, 201 bp, synthetic construct
  misc_feature 1..201: note = Synthetic
  source 1..201: mol_type = other DNA
ctgacctgaacttgatctcgatcaacccttgaggttcgagaacattgccctttgcagtcctctcagcatagaactcaatgcgatcggtatttatcttgcttccaatcacgacccaagcccctccacgtagctctgcagccttggggatatatacaaaggcaggctgattgtatgtcctaaggttctcaacaattgttgacc

SEQ ID NO: 581 - DNA, 201 bp, synthetic construct
  misc_feature 1..201: note = Synthetic
  source 1..201: mol_type = other DNA
ctgacctgaacttgatctcgatcaacccttgaggttcgagaacattgccctttgcagtcctctcagcatagaactcaatgcgatcggtatttatcttgctcccaatcacgacccaagcccctccacgtagctctgcagccttggggatatatacaaaggcaggctgattgtatgtcctaaggttctcaacaattgttgacc

SEQ ID NO: 582 - DNA, 201 bp, synthetic construct
  misc_feature 1..201: note = Synthetic
  source 1..201: mol_type = other DNA
ctgacctgaacttgatctcgatcaacccttgaggttcgagaacattgccctttgcagtcctctcagcatagaactcaatgcgatctgtatttatcttgctaccaatcacgacccaagcccctccacgtagctctgcagccttggggatatatacaaaggcaggctgattgtatgtcctaaggttctcaacaattgttgacc

SEQ ID NO: 583 - DNA, 201 bp, synthetic construct
  misc_feature 1..201: note = Synthetic
  source 1..201: mol_type = other DNA
ctgacctgaacttgatctcgatcaacccttgaggttcgagaacattgccctttgcagtcctctcagcatagaactcaatgcgatctgtatttatcttgctgccaatcacgacccaagcccctccacgtagctctgcagccttggggatatatacaaaggcaggctgattgtatgtcctaaggttctcaacaattgttgacc

SEQ ID NO: 584 - DNA, 201 bp, synthetic construct
  misc_feature 1..201: note = Synthetic
  source 1..201: mol_type = other DNA
ctgacctgaacttgatctcgatcaacccttgaggttcgagaacattgccctttgcagtcctctcagcatagaactcaatgcgatctgtatttatcttgcttccaatcacgacccaagcccctccacgtagctctgcagccttggggatatatacaaaggcaggctgattgtatgtcctaaggttctcaacaattgttgacc

SEQ ID NO: 585 - DNA, 201 bp, synthetic construct
  misc_feature 1..201: note = Synthetic
  source 1..201: mol_type = other DNA
ctgacctgaacttgatctcgatcaacccttgaggttcgagaacattgccctttgcagtcctctcagcatagaactcaatgcgatctgtatttatcttgctcccaatcacgacccaagcccctccacgtagctctgcagccttggggatatatacaaaggcaggctgattgtatgtcctaaggttctcaacaattgttgacc

SEQ ID NO: 586 - DNA, 201 bp, synthetic construct
  misc_feature 1..201: note = Synthetic
  source 1..201: mol_type = other DNA
ctgacctgaacttgatctcgatcaacccttgaggttcgagaacattgccctttgcagtcctctcagcatagaactcaatgcgatccgtatttatcttgctaccaatcacgacccaagcccctccacgtagctctgcagccttggggatatatacaaaggcaggctgattgtatgtcctaaggttctcaacaattgttgacc

SEQ ID NO: 587 - DNA, 201 bp, synthetic construct
  misc_feature 1..201: note = Synthetic
  source 1..201: mol_type = other DNA
ctgacctgaacttgatctcgatcaacccttgaggttcgagaacattgccctttgcagtcctctcagcatagaactcaatgcgatccgtatttatcttgctgccaatcacgacccaagcccctccacgtagctctgcagccttggggatatatacaaaggcaggctgattgtatgtcctaaggttctcaacaattgttgacc

SEQ ID NO: 588 - DNA, 201 bp, synthetic construct
  misc_feature 1..201: note = Synthetic
  source 1..201: mol_type = other DNA
ctgacctgaacttgatctcgatcaacccttgaggttcgagaacattgccctttgcagtcctctcagcatagaactcaatgcgatccgtatttatcttgcttccaatcacgacccaagcccctccacgtagctctgcagccttggggatatatacaaaggcaggctgattgtatgtcctaaggttctcaacaattgttgacc

SEQ ID NO: 589 - DNA, 201 bp, synthetic construct
  misc_feature 1..201: note = Synthetic
  source 1..201: mol_type = other DNA
ctgacctgaacttgatctcgatcaacccttgaggttcgagaacattgccctttgcagtcctctcagcatagaactcaatgcgatccgtatttatcttgctcccaatcacgacccaagcccctccacgtagctctgcagccttggggatatatacaaaggcaggctgattgtatgtcctaaggttctcaacaattgttgacc

SEQ ID NO: 590 - DNA, 101 bp, synthetic construct
  misc_feature 1..101: note = Synthetic
  variation 36: note = n is a, c, g, or t
  variation 51: note = n is a, c, g, or t
  source 1..101: mol_type = other DNA
tttgcagtcctctcagcatagaactcaatgcgatcngtatttatcttgctnccaatcacgacccaagcccctccacgtagctctgcagccttggggatata

SEQ ID NO: 591 - DNA, 101 bp, synthetic construct
  misc_feature 1..101: note = Synthetic
  source 1..101: mol_type = other DNA
tatatccccaaggctgcagagctacgtggaggggcttgggtcgtgattggtagcaagataaatacagatcgaattgagttctatgctgagaggactgcaaa

SEQ ID NO: 592 - DNA, 101 bp, synthetic construct
  misc_feature 1..101: note = Synthetic
  source 1..101: mol_type = other DNA
tttgcagtcctctcagcatagaactcaattcgatctgtatttatcttgctaccaatcacgacccaagcccctccacgtagctctgcagccttggggatata

SEQ ID NO: 593 - DNA, 101 bp, synthetic construct
  misc_feature 1..101: note = Synthetic
  variation 51: note = n is a, c, g, or t
  variation 66: note = n is a, c, g, or t
  source 1..101: mol_type = other DNA
tatatccccaaggctgcagagctacgtggaggggcttgggtcgtgattggnagcaagataaatacngatcgaattgagttctatgctgagaggactgcaaa

SEQ ID NO: 594 - DNA, 101 bp, synthetic construct
  misc_feature 1..101: note = Synthetic
  variation 36: note = n is a, c, g, or t
  variation 51: note = n is a, c, g, or t
  source 1..101: mol_type = other DNA
tttgcagtcctctcagcatagaactcaattcgatcngtatttatcttgctnccaatcacgacccaagcccctccacgtagctctgcagccttggggatata

SEQ ID NO: 595 - DNA, 20 bp, synthetic construct
  misc_feature 1..20: note = Synthetic
  source 1..20: mol_type = other DNA
ggttaattgaaatcaagttc

SEQ ID NO: 596 - DNA, 20 bp, synthetic construct
  misc_feature 1..20: note = Synthetic
  source 1..20: mol_type = other DNA
ttgatttcaattaacccttg

SEQ ID NO: 597 - DNA, 20 bp, synthetic construct
  misc_feature 1..20: note = Synthetic
  source 1..20: mol_type = other DNA
gtaatgttctcgaacctcaa

SEQ ID NO: 598 - DNA, 20 bp, synthetic construct
  misc_feature 1..20: note = Synthetic
  source 1..20: mol_type = other DNA
ggtaatgttctcgaacctca

SEQ ID NO: 599 - DNA, 20 bp, synthetic construct
  misc_feature 1..20: note = Synthetic
  source 1..20: mol_type = other DNA
aggttcgagaacattacctt

SEQ ID NO: 600 - DNA, 20 bp, synthetic construct
  misc_feature 1..20: note = Synthetic
  source 1..20: mol_type = other DNA
tatgctgaaaggactgccaa

SEQ ID NO: 601 - DNA, 20 bp, synthetic construct
  misc_feature 1..20: note = Synthetic
  source 1..20: mol_type = other DNA
gcattgagtgttatgctgaa

SEQ ID NO: 602 - DNA, 20 bp, synthetic construct
  misc_feature 1..20: note = Synthetic
  source 1..20: mol_type = other DNA
tttcagcataacactcaatg

SEQ ID NO: 603 - DNA, 20 bp, synthetic construct
  misc_feature 1..20: note = Synthetic
  source 1..20: mol_type = other DNA
gcataacactcaatgcggtc

SEQ ID NO: 604 - DNA, 20 bp, synthetic construct
  misc_feature 1..20: note = Synthetic
  source 1..20: mol_type = other DNA
tcgtggaggagcttgggttg

SEQ ID NO: 605 - DNA, 20 bp, synthetic construct
  misc_feature 1..20: note = Synthetic
  source 1..20: mol_type = other DNA
agagcttcgtggaggagctt

SEQ ID NO: 606 - DNA, 20 bp, synthetic construct
  misc_feature 1..20: note = Synthetic
  source 1..20: mol_type = other DNA
gagagcttcgtggaggagct

SEQ ID NO: 607 - DNA, 20 bp, synthetic construct
  misc_feature 1..20: note = Synthetic
  source 1..20: mol_type = other DNA
atggctggagagcttcgtgg

SEQ ID NO: 608 - DNA, 20 bp, synthetic construct
  misc_feature 1..20: note = Synthetic
  source 1..20: mol_type = other DNA
cctatggctggagagcttcg

SEQ ID NO: 609 - DNA, 20 bp, synthetic construct
  misc_feature 1..20: note = Synthetic
  source 1..20: mol_type = other DNA
ccacgaagctctccagccat

SEQ ID NO: 610 - DNA, 20 bp, synthetic construct
  misc_feature 1..20: note = Synthetic
  source 1..20: mol_type = other DNA
tttgtgtacattcctatggc

SEQ ID NO: 611 - DNA, 20 bp, synthetic construct
  misc_feature 1..20: note = Synthetic
  source 1..20: mol_type = other DNA
tgcttttgtgtacattccta

SEQ ID NO: 612 - DNA, 20 bp, synthetic construct
  misc_feature 1..20: note = Synthetic
  source 1..20: mol_type = other DNA
ataggaatgtacacaaaagc

SEQ ID NO: 613 - DNA, 20 bp, synthetic construct
  misc_feature 1..20: note = Synthetic
  source 1..20: mol_type = other DNA
caggctgattatatgtccta

SEQ ID NO: 614 - DNA, 20 bp, synthetic construct
  misc_feature 1..20: note = Synthetic
  source 1..20: mol_type = other DNA
caacaattgtcgagaacctt

SEQ ID NO: 615 - DNA, 24 bp, synthetic construct
  misc_feature 1..24: note = Synthetic
  source 1..24: mol_type = other DNA
aattaacccttgaggttcgagaac

SEQ ID NO: 616 - DNA, 24 bp, synthetic construct
  misc_feature 1..24: note = Synthetic
  source 1..24: mol_type = other DNA
gcagtcctttcagcataacactca

SEQ ID NO: 617 - DNA, 24 bp, synthetic construct
  misc_feature 1..24: note = Synthetic
  source 1..24: mol_type = other DNA
agcataacactcaatgcggtctgg

SEQ ID NO: 618 - DNA, 24 bp, synthetic construct
  misc_feature 1..24: note = Synthetic
  source 1..24: mol_type = other DNA
ttttgctatcgaccacaacccaag

SEQ ID NO: 619 - DNA, 24 bp, synthetic construct
  misc_feature 1..24: note = Synthetic
  source 1..24: mol_type = other DNA
gctatcgaccacaacccaagctcc

SEQ ID NO: 620 - DNA, 24 bp, synthetic construct
  misc_feature 1..24: note = Synthetic
  source 1..24: mol_type = other DNA
ctatcgaccacaacccaagctcct

SEQ ID NO: 621 - DNA, 24 bp, synthetic construct
  misc_feature 1..24: note = Synthetic
  source 1..24: mol_type = other DNA
tgtacattcctatggctggagagc

SEQ ID NO: 622 - DNA, 24 bp, synthetic construct
  misc_feature 1..24: note = Synthetic
  source 1..24: mol_type = other DNA
gtgtacattcctatggctggagag

SEQ ID NO: 623 - DNA, 20 bp, synthetic construct
  misc_feature 1..20: note = Synthetic
  source 1..20: mol_type = other DNA
gaacttgatttcaattaacc

SEQ ID NO: 624 - DNA, 20 bp, synthetic construct
  misc_feature 1..20: note = Synthetic
  source 1..20: mol_type = other DNA
caagggttaattgaaatcaa

SEQ ID NO: 625 - DNA, 20 bp, synthetic construct
  misc_feature 1..20: note = Synthetic
  source 1..20: mol_type = other DNA
ttgaggttcgagaacattac

SEQ ID NO: 626 - DNA, 20 bp, synthetic construct
  misc_feature 1..20: note = Synthetic
  source 1..20: mol_type = other DNA
tgaggttcgagaacattacc

SEQ ID NO: 627 - DNA, 20 bp, synthetic construct
  misc_feature 1..20: note = Synthetic
  source 1..20: mol_type = other DNA
aaggtaatgttctcgaacct

SEQ ID NO: 628 - DNA, 20 bp, synthetic construct
  misc_feature 1..20: note = Synthetic
  source 1..20: mol_type = other DNA
ttggcagtcctttcagcata

SEQ ID NO: 629 - DNA, 20 bp, synthetic construct
  misc_feature 1..20: note = Synthetic
  source 1..20: mol_type = other DNA
ttcagcataacactcaatgc

SEQ ID NO: 630 - DNA, 20 bp, synthetic construct
  misc_feature 1..20: note = Synthetic
  source 1..20: mol_type = other DNA
cattgagtgttatgctgaaa

SEQ ID NO: 631 - DNA, 20 bp, synthetic construct
  misc_feature 1..20: note = Synthetic
  source 1..20: mol_type = other DNA
gaccgcattgagtgttatgc

SEQ ID NO: 632 - DNA, 20 bp, synthetic construct
  misc_feature 1..20: note = Synthetic
  source 1..20: mol_type = other DNA
caacccaagctcctccacga

SEQ ID NO: 633 - DNA, 20 bp, synthetic construct
  misc_feature 1..20: note = Synthetic
  source 1..20: mol_type = other DNA
aagctcctccacgaagctct

SEQ ID NO: 634 - DNA, 20 bp, synthetic construct
  misc_feature 1..20: note = Synthetic
  source 1..20: mol_type = other DNA
agctcctccacgaagctctc

SEQ ID NO: 635 - DNA, 20 bp, synthetic construct
  misc_feature 1..20: note = Synthetic
  source 1..20: mol_type = other DNA
ccacgaagctctccagccat

SEQ ID NO: 636 - DNA, 20 bp, synthetic construct
  misc_feature 1..20: note = Synthetic
  source 1..20: mol_type = other DNA
cgaagctctccagccatagg

SEQ ID NO: 637 - DNA, 20 bp, synthetic construct
  misc_feature 1..20: note = Synthetic
  source 1..20: mol_type = other DNA
atggctggagagcttcgtgg

SEQ ID NO: 638 - DNA, 20 bp, synthetic construct
  misc_feature 1..20: note = Synthetic
  source 1..20: mol_type = other DNA
gccataggaatgtacacaaa

SEQ ID NO: 639 - DNA, 20 bp, synthetic construct
  misc_feature 1..20: note = Synthetic
  source 1..20: mol_type = other DNA
taggaatgtacacaaaagca

SEQ ID NO: 640 - DNA, 20 bp, synthetic construct
  misc_feature 1..20: note = Synthetic
  source 1..20: mol_type = other DNA
gcttttgtgtacattcctat

SEQ ID NO: 641 - DNA, 20 bp, synthetic construct
  misc_feature 1..20: note = Synthetic
  source 1..20: mol_type = other DNA
taggacatataatcagcctg

SEQ ID NO: 642 - DNA, 20 bp, synthetic construct
  misc_feature 1..20: note = Synthetic
  source 1..20: mol_type = other DNA
aaggttctcgacaattgttg

SEQ ID NO: 643 - DNA, 24 bp, synthetic construct
  misc_feature 1..24: note = Synthetic
  source 1..24: mol_type = other DNA
gttctcgaacctcaagggttaatt

SEQ ID NO: 644 - DNA, 24 bp, synthetic construct
  misc_feature 1..24: note = Synthetic
  source 1..24: mol_type = other DNA
tgagtgttatgctgaaaggactgc

SEQ ID NO: 645 - DNA, 24 bp, synthetic construct
  misc_feature 1..24: note = Synthetic
  source 1..24: mol_type = other DNA
ccagaccgcattgagtgttatgct

SEQ ID NO: 646 - DNA, 24 bp, synthetic construct
  misc_feature 1..24: note = Synthetic
  source 1..24: mol_type = other DNA
cttgggttgtggtcgatagcaaaa

SEQ ID NO: 647 - DNA, 24 bp, synthetic construct
  misc_feature 1..24: note = Synthetic
  source 1..24: mol_type = other DNA
ggagcttgggttgtggtcgatagc

SEQ ID NO: 648 - DNA, 24 bp, synthetic construct
  misc_feature 1..24: note = Synthetic
  source 1..24: mol_type = other DNA
aggagcttgggttgtggtcgatag

SEQ ID NO: 649 - DNA, 24 bp, synthetic construct
  misc_feature 1..24: note = Synthetic
  source 1..24: mol_type = other DNA
gctctccagccataggaatgtaca

SEQ ID NO: 650 - DNA, 24 bp, synthetic construct
  misc_feature 1..24: note = Synthetic
  source 1..24: mol_type = other DNA
ctctccagccataggaatgtacac

SEQ ID NO: 651 - DNA, 20 bp, synthetic construct
  misc_feature 1..20: note = Synthetic
  source 1..20: mol_type = other DNA
ggagcttcgtggaggagctt

SEQ ID NO: 652 - DNA, 101 bp, synthetic construct
  misc_feature 1..101: note = Synthetic
  source 1..101: mol_type = other DNA
tacattcctatggctggagagcttcgtggaggagcttgggttgtggtcggtagcaaaataaatccagaccgcattgagtgttatgctgaaaggactgccaa

SEQ ID NO: 653 - DNA, 101 bp, synthetic construct
  misc_feature 1..101: note = Synthetic
  source 1..101: mol_type = other DNA
tacattcctatggctggagagcttcgtggaggagcttgggttgtggtcggcagcaaaataaatccagaccgcattgagtgttatgctgaaaggactgccaa

SEQ ID NO: 654 - DNA, 101 bp, synthetic construct
  misc_feature 1..101: note = Synthetic
  source 1..101: mol_type = other DNA
tacattcctatggctggagagcttcgtggaggagcttgggttgtggtcggaagcaaaataaatccagaccgcattgagtgttatgctgaaaggactgccaa

SEQ ID NO: 655 - DNA, 101 bp, synthetic construct
  misc_feature 1..101: note = Synthetic
  source 1..101: mol_type = other DNA
tacattcctatggctggagagcttcgtggaggagcttgggttgtggtcgggagcaaaataaatccagaccgcattgagtgttatgctgaaaggactgccaa

SEQ ID NO: 656 - DNA, 101 bp, synthetic construct
  misc_feature 1..101: note = Synthetic
  source 1..101: mol_type = other DNA
tacattcctatggctggagagcttcgtggaggagcttgggttgtggtcgatagcaaaataaatactgaccgcattgagtgttatgctgaaaggactgccaa

SEQ ID NO: 657 - DNA, 101 bp, synthetic construct
  misc_feature 1..101: note = Synthetic
  source 1..101: mol_type = other DNA
tacattcctatggctggagagcttcgtggaggagcttgggttgtggtcgatagcaaaataaataccgaccgcattgagtgttatgctgaaaggactgccaa

SEQ ID NO: 658 - DNA, 101 bp, synthetic construct
  misc_feature 1..101: note = Synthetic
  source 1..101: mol_type = other DNA
tacattcctatggctggagagcttcgtggaggagcttgggttgtggtcgatagcaaaataaatacagaccgcattgagtgttatgctgaaaggactgccaa

SEQ ID NO: 659 - DNA, 101 bp, synthetic construct
  misc_feature 1..101: note = Synthetic
  source 1..101: mol_type = other DNA
tacattcctatggctggagagcttcgtggaggagcttgggttgtggtcgatagcaaaataaatacggaccgcattgagtgttatgctgaaaggactgccaa

SEQ ID NO: 660 - DNA, 101 bp, synthetic construct
  misc_feature 1..101: note = Synthetic
  source 1..101: mol_type = other DNA
tacattcctatggctggagagcttcgtggaggagcttgggttgtggtcggtagcaaaataaatactgaccgcattgagtgttatgctgaaaggactgccaa

SEQ ID NO: 661 - DNA, 101 bp, synthetic construct
  misc_feature 1..101: note = Synthetic
  source 1..101: mol_type = other DNA
tacattcctatggctggagagcttcgtggaggagcttgggttgtggtcggcagcaaaataaatactgaccgcattgagtgttatgctgaaaggactgccaa

SEQ ID NO: 662 - DNA, 101 bp, synthetic construct
  misc_feature 1..101: note = Synthetic
  source 1..101: mol_type = other DNA
tacattcctatggctggagagcttcgtggaggagcttgggttgtggtcggaagcaaaataaatactgaccgcattgagtgttatgctgaaaggactgccaa

SEQ ID NO: 663 - DNA, 101 bp, synthetic construct
  misc_feature 1..101: note = Synthetic
  source 1..101: mol_type = other DNA
tacattcctatggctggagagcttcgtggaggagcttgggttgtggtcgggagcaaaataaatactgaccgcattgagtgttatgctgaaaggactgccaa

SEQ ID NO: 664 - DNA, 101 bp, synthetic construct
  misc_feature 1..101: note = Synthetic
  source 1..101: mol_type = other DNA
tacattcctatggctggagagcttcgtggaggagcttgggttgtggtcggtagcaaaataaataccgaccgcattgagtgttatgctgaaaggactgccaa

SEQ ID NO: 665 - DNA, 101 bp, synthetic construct
  misc_feature 1..101: note = Synthetic
  source 1..101: mol_type = other DNA
tacattcctatggctggagagcttcgtggaggagcttgggttgtggtcggcagcaaaataaataccgaccgcattgagtgttatgctgaaaggactgccaa

SEQ ID NO: 666 - DNA, 101 bp, synthetic construct
  misc_feature 1..101: note = Synthetic
  source 1..101: mol_type = other DNA
tacattcctatggctggagagcttcgtggaggagcttgggttgtggtcggaagcaaaataaataccgaccgcattgagtgttatgctgaaaggactgccaa

SEQ ID NO: 667 - DNA, 101 bp, synthetic construct
  misc_feature 1..101: note = Synthetic
  source 1..101: mol_type = other DNA
tacattcctatggctggagagcttcgtggaggagcttgggttgtggtcgggagcaaaataaataccgaccgcattgagtgttatgctgaaaggactgccaa

SEQ ID NO: 668 - DNA, 101 bp, synthetic construct
  misc_feature 1..101: note = Synthetic
  source 1..101: mol_type = other DNA
tacattcctatggctggagagcttcgtggaggagcttgggttgtggtcggtagcaaaataaatacagaccgcattgagtgttatgctgaaaggactgccaa

SEQ ID NO: 669 - DNA, 101 bp, synthetic construct
  misc_feature 1..101: note = Synthetic
  source 1..101: mol_type = other DNA
tacattcctatggctggagagcttcgtggaggagcttgggttgtggtcggcagcaaaataaatacagaccgcattgagtgttatgctgaaaggactgccaa

SEQ ID NO: 670 - DNA, 101 bp, synthetic construct
  misc_feature 1..101: note = Synthetic
  source 1..101: mol_type = other DNA
tacattcctatggctggagagcttcgtggaggagcttgggttgtggtcggaagcaaaataaatacagaccgcattgagtgttatgctgaaaggactgccaa

SEQ ID NO: 671 - DNA, 101 bp, synthetic construct
  misc_feature 1..101: note = Synthetic
  source 1..101: mol_type = other DNA
tacattcctatggctggagagcttcgtggaggagcttgggttgtggtcgggagcaaaataaatacagaccgcattgagtgttatgctgaaaggactgccaa

SEQ ID NO: 672 - DNA, 101 bp, synthetic construct
  misc_feature 1..101: note = Synthetic
  source 1..101: mol_type = other DNA
tacattcctatggctggagagcttcgtggaggagcttgggttgtggtcggtagcaaaataaatacggaccgcattgagtgttatgctgaaaggactgccaa

SEQ ID NO: 673 - DNA, 101 bp, synthetic construct
  misc_feature 1..101: note = Synthetic
  source 1..101: mol_type = other DNA
tacattcctatggctggagagcttcgtggaggagcttgggttgtggtcggcagcaaaataaatacggaccgcattgagtgttatgctgaaaggactgccaa

SEQ ID NO: 674 - DNA, 101 bp, synthetic construct
  misc_feature 1..101: note = Synthetic
  source 1..101: mol_type = other DNA
tacattcctatggctggagagcttcgtggaggagcttgggttgtggtcggaagcaaaataaatacggaccgcattgagtgttatgctgaaaggactgccaa

SEQ ID NO: 675 - DNA, 101 bp, synthetic construct
  misc_feature 1..101: note = Synthetic
  source 1..101: mol_type = other DNA
tacattcctatggctggagagcttcgtggaggagcttgggttgtggtcgggagcaaaataaatacggaccgcattgagtgttatgctgaaaggactgccaa

SEQ ID NO: 676 - DNA, 201 bp, synthetic construct
  misc_feature 1..201: note = Synthetic
  source 1..201: mol_type = other DNA
ggtcaacaattgtcgagaaccttaggacatataatcagcctgcttttgtgtacattcctatggctggagagcttcgtggaggagcttgggttgtggtcggtagcaaaataaatccagaccgcattgagtgttatgctgaaaggactgccaaaggtaatgttctcgaacctcaagggttaattgaaatcaagttcaggtcag

SEQ ID NO: 677 - DNA, 201 bp, synthetic construct
  misc_feature 1..201: note = Synthetic
  source 1..201: mol_type = other DNA
ggtcaacaattgtcgagaaccttaggacatataatcagcctgcttttgtgtacattcctatggctggagagcttcgtggaggagcttgggttgtggtcggcagcaaaataaatccagaccgcattgagtgttatgctgaaaggactgccaaaggtaatgttctcgaacctcaagggttaattgaaatcaagttcaggtcag

SEQ ID NO: 678 - DNA, 201 bp, synthetic construct
  misc_feature 1..201: note = Synthetic
  source 1..201: mol_type = other DNA
ggtcaacaattgtcgagaaccttaggacatataatcagcctgcttttgtgtacattcctatggctggagagcttcgtggaggagcttgggttgtggtcggaagcaaaataaatccagaccgcattgagtgttatgctgaaaggactgccaaaggtaatgttctcgaacctcaagggttaattgaaatcaagttcaggtcag

SEQ ID NO: 679 - DNA, 201 bp, synthetic construct
  misc_feature 1..201: note = Synthetic
  source 1..201: mol_type = other DNA
ggtcaacaattgtcgagaaccttaggacatataatcagcctgcttttgtgtacattcctatggctggagagcttcgtggaggagcttgggttgtggtcgggagcaaaataaatccagaccgcattgagtgttatgctgaaaggactgccaaaggtaatgttctcgaacctcaagggttaattgaaatcaagttcaggtcag

SEQ ID NO: 680 - DNA, 201 bp, synthetic construct
  misc_feature 1..201: note = Synthetic
  source 1..201: mol_type = other DNA
ggtcaacaattgtcgagaaccttaggacatataatcagcctgcttttgtgtacattcctatggctggagagcttcgtggaggagcttgggttgtggtcgatagcaaaataaatactgaccgcattgagtgttatgctgaaaggactgccaaaggtaatgttctcgaacctcaagggttaattgaaatcaagttcaggtcag

SEQ ID NO: 681 - DNA, 201 bp, synthetic construct
  misc_feature 1..201: note = Synthetic
  source 1..201: mol_type = other DNA
ggtcaacaattgtcgagaaccttaggacatataatcagcctgcttttgtgtacattcctatggctggagagcttcgtggaggagcttgggttgtggtcgatagcaaaataaataccgaccgcattgagtgttatgctgaaaggactgccaaaggtaatgttctcgaacctcaagggttaattgaaatcaagttcaggtcag

SEQ ID NO: 682 - DNA, 201 bp, synthetic construct
  misc_feature 1..201: note = Synthetic
  source 1..201: mol_type = other DNA
ggtcaacaattgtcgagaaccttaggacatataatcagcctgcttttgtgtacattcctatggctggagagcttcgtggaggagcttgggttgtggtcgatagcaaaataaatacagaccgcattgagtgttatgctgaaaggactgccaaaggtaatgttctcgaacctcaagggttaattgaaatcaagttcaggtcag

SEQ ID NO: 683 - DNA, 201 bp, synthetic construct
  misc_feature 1..201: note = Synthetic
  source 1..201: mol_type = other DNA
ggtcaacaattgtcgagaaccttaggacatataatcagcctgcttttgtgtacattcctatggctggagagcttcgtggaggagcttgggttgtggtcgatagcaaaataaatacggaccgcattgagtgttatgctgaaaggactgccaaaggtaatgttctcgaacctcaagggttaattgaaatcaagttcaggtcag

SEQ ID NO: 684 - DNA, 201 bp, synthetic construct
  misc_feature 1..201: note = Synthetic
  source 1..201: mol_type = other DNA
ggtcaacaattgtcgagaaccttaggacatataatcagcctgcttttgtgtacattcctatggctggagagcttcgtggaggagcttgggttgtggtcggtagcaaaataaatactgaccgcattgagtgttatgctgaaaggactgccaaaggtaatgttctcgaacctcaagggttaattgaaatcaagttcaggtcag

SEQ ID NO: 685 - DNA, 201 bp, synthetic construct
  misc_feature 1..201: note = Synthetic
  source 1..201: mol_type = other DNA
ggtcaacaattgtcgagaaccttaggacatataatcagcctgcttttgtgtacattcctatggctggagagcttcgtggaggagcttgggttgtggtcggcagcaaaataaatactgaccgcattgagtgttatgctgaaaggactgccaaaggtaatgttctcgaacctcaagggttaattgaaatcaagttcaggtcag

SEQ ID NO: 686 - DNA, 201 bp, synthetic construct
  misc_feature 1..201: note = Synthetic
  source 1..201: mol_type = other DNA
ggtcaacaattgtcgagaaccttaggacatataatcagcctgcttttgtgtacattcctatggctggagagcttcgtggaggagcttgggttgtggtcggaagcaaaataaatactgaccgcattgagtgttatgctgaaaggactgccaaaggtaatgttctcgaacctcaagggttaattgaaatcaagttcaggtcag

SEQ ID NO: 687 - DNA, 201 bp, synthetic construct
  misc_feature 1..201: note = Synthetic
  source 1..201: mol_type = other DNA
ggtcaacaattgtcgagaaccttaggacatataatcagcctgcttttgtgtacattcctatggctggagagcttcgtggaggagcttgggttgtggtcgggagcaaaataaatactgaccgcattgagtgttatgctgaaaggactgccaaaggtaatgttctcgaacctcaagggttaattgaaatcaagttcaggtcag

SEQ ID NO: 688 - DNA, 201 bp, synthetic construct
  misc_feature 1..201: note = Synthetic
  source 1..201: mol_type = other DNA
ggtcaacaattgtcgagaaccttaggacatataatcagcctgcttttgtgtacattcctatggctggagagcttcgtggaggagcttgggttgtggtcggtagcaaaataaataccgaccgcattgagtgttatgctgaaaggactgccaaaggtaatgttctcgaacctcaagggttaattgaaatcaagttcaggtcag

SEQ ID NO: 689 - DNA, 201 bp, synthetic construct
  misc_feature 1..201: note = Synthetic
  source 1..201: mol_type = other DNA
ggtcaacaattgtcgagaaccttaggacatataatcagcctgcttttgtgtacattcctatggctggagagcttcgtggaggagcttgggttgtggtcggcagcaaaataaataccgaccgcattgagtgttatgctgaaaggactgccaaaggtaatgttctcgaacctcaagggttaattgaaatcaagttcaggtcag

SEQ ID NO: 690 - DNA, 201 bp, synthetic construct
  misc_feature 1..201: note = Synthetic
  source 1..201: mol_type = other DNA
ggtcaacaattgtcgagaaccttaggacatataatcagcctgcttttgtgtacattcctatggctggagagcttcgtggaggagcttgggttgtggtcggaagcaaaataaataccgaccgcattgagtgttatgctgaaaggactgccaaaggtaatgttctcgaacctcaagggttaattgaaatcaagttcaggtcag

SEQ ID NO: 691 - DNA, 201 bp, synthetic construct
  misc_feature 1..201: note = Synthetic
  source 1..201: mol_type = other DNA
ggtcaacaattgtcgagaaccttaggacatataatcagcctgcttttgtgtacattcctatggctggagagcttcgtggaggagcttgggttgtggtcgggagcaaaataaataccgaccgcattgagtgttatgctgaaaggactgccaaaggtaatgttctcgaacctcaagggttaattgaaatcaagttcaggtcag

SEQ ID NO: 692 - DNA, 201 bp, synthetic construct
  misc_feature 1..201: note = Synthetic
  source 1..201: mol_type = other DNA
ggtcaacaattgtcgagaaccttaggacatataatcagcctgcttttgtgtacattcctatggctggagagcttcgtggaggagcttgggttgtggtcggtagcaaaataaatacagaccgcattgagtgttatgctgaaaggactgccaaaggtaatgttctcgaacctcaagggttaattgaaatcaagttcaggtcag

SEQ ID NO: 693 - DNA, 201 bp, synthetic construct
  misc_feature 1..201: note = Synthetic
  source 1..201: mol_type = other DNA
ggtcaacaattgtcgagaaccttaggacatataatcagcctgcttttgtgtacattcctatggctggagagcttcgtggaggagcttgggttgtggtcggcagcaaaataaatacagaccgcattgagtgttatgctgaaaggactgccaaaggtaatgttctcgaacctcaagggttaattgaaatcaagttcaggtcag

SEQ ID NO: 694 - DNA, 201 bp, synthetic construct
  misc_feature 1..201: note = Synthetic
  source 1..201: mol_type = other DNA
ggtcaacaattgtcgagaaccttaggacatataatcagcctgcttttgtgtacattcctatggctggagagcttcgtggaggagcttgggttgtggtcggaagcaaaataaatacagaccgcattgagtgttatgctgaaaggactgccaaaggtaatgttctcgaacctcaagggttaattgaaatcaagttcaggtcag

SEQ ID NO: 695 - DNA, 201 bp, synthetic construct
  misc_feature 1..201: note = Synthetic
  source 1..201: mol_type = other DNA
ggtcaacaattgtcgagaaccttaggacatataatcagcctgcttttgtgtacattcctatggctggagagcttcgtggaggagcttgggttgtggtcgggagcaaaataaatacagaccgcattgagtgttatgctgaaaggactgccaaaggtaatgttctcgaacctcaagggttaattgaaatcaagttcaggtcag

SEQ ID NO: 696 - DNA, 201 bp, synthetic construct
  misc_feature 1..201: note = Synthetic
  source 1..201: mol_type = other DNA
ggtcaacaattgtcgagaaccttaggacatataatcagcctgcttttgtgtacattcctatggctggagagcttcgtggaggagcttgggttgtggtcggtagcaaaataaatacggaccgcattgagtgttatgctgaaaggactgccaaaggtaatgttctcgaacctcaagggttaattgaaatcaagttcaggtcag

SEQ ID NO: 697 - DNA, 201 bp, synthetic construct
  misc_feature 1..201: note = Synthetic
  source 1..201: mol_type = other DNA
ggtcaacaattgtcgagaaccttaggacatataatcagcctgcttttgtgtacattcctatggctggagagcttcgtggaggagcttgggttgtggtcggcagcaaaataaatacggaccgcattgagtgttatgctgaaaggactgccaaaggtaatgttctcgaacctcaagggttaattgaaatcaagttcaggtcag

SEQ ID NO: 698 - DNA, 201 bp, synthetic construct
  misc_feature 1..201: note = Synthetic
  source 1..201: mol_type = other DNA
ggtcaacaattgtcgagaaccttaggacatataatcagcctgcttttgtgtacattcctatggctggagagcttcgtggaggagcttgggttgtggtcggaagcaaaataaatacggaccgcattgagtgttatgctgaaaggactgccaaaggtaatgttctcgaacctcaagggttaattgaaatcaagttcaggtcag

SEQ ID NO: 699 - DNA, 201 bp, synthetic construct
  misc_feature 1..201: note = Synthetic
  source 1..201: mol_type = other DNA
ggtcaacaattgtcgagaaccttaggacatataatcagcctgcttttgtgtacattcctatggctggagagcttcgtggaggagcttgggttgtggtcgggagcaaaataaatacggaccgcattgagtgttatgctgaaaggactgccaaaggtaatgttctcgaacctcaagggttaattgaaatcaagttcaggtcag

SEQ ID NO: 700 - DNA, 101 bp, synthetic construct
  misc_feature 1..101: note = Synthetic
  source 1..101: mol_type = other DNA
ttggcagtcctttcagcataacactcaatgcggtctggatttattttgctaccgaccacaacccaagctcctccacgaagctctccagccataggaatgta

SEQ ID NO: 701 - DNA, 101 bp, synthetic construct
  misc_feature 1..101: note = Synthetic
  source 1..101: mol_type = other DNA
ttggcagtcctttcagcataacactcaatgcggtctggatttattttgctgccgaccacaacccaagctcctccacgaagctctccagccataggaatgta

SEQ ID NO: 702 - DNA, 101 bp, synthetic construct
  misc_feature 1..101: note = Synthetic
  source 1..101: mol_type = other DNA
ttggcagtcctttcagcataacactcaatgcggtctggatttattttgcttccgaccacaacccaagctcctccacgaagctctccagccataggaatgta

SEQ ID NO: 703 - DNA, 101 bp, synthetic construct
  misc_feature 1..101: note = Synthetic
  source 1..101: mol_type = other DNA
ttggcagtcctttcagcataacactcaatgcggtctggatttattttgctcccgaccacaacccaagctcctccacgaagctctccagccataggaatgta

SEQ ID NO: 704 - DNA, 101 bp, synthetic construct
  misc_feature 1..101: note = Synthetic
  source 1..101: mol_type = other DNA
ttggcagtcctttcagcataacactcaatgcggtcagtatttattttgctatcgaccacaacccaagctcctccacgaagctctccagccataggaatgta

SEQ ID NO: 705 - DNA, 101 bp, synthetic construct
  misc_feature 1..101: note = Synthetic
  source 1..101: mol_type = other DNA
ttggcagtcctttcagcataacactcaatgcggtcggtatttattttgctatcgaccacaacccaagctcctccacgaagctctccagccataggaatgta

SEQ ID NO: 706 - DNA, 101 bp, synthetic construct
  misc_feature 1..101: note = Synthetic
  source 1..101: mol_type = other DNA
ttggcagtcctttcagcataacactcaatgcggtctgtatttattttgctatcgaccacaacccaagctcctccacgaagctctccagccataggaatgta

SEQ ID NO: 707 - DNA, 101 bp, synthetic construct
  misc_feature 1..101: note = Synthetic
  source 1..101: mol_type = other DNA
ttggcagtcctttcagcataacactcaatgcggtccgtatttattttgctatcgaccacaacccaagctcctccacgaagctctccagccataggaatgta

SEQ ID NO: 708 - DNA, 101 bp, synthetic construct
  misc_feature 1..101: note = Synthetic
  source 1..101: mol_type = other DNA
ttggcagtcctttcagcataacactcaatgcggtcagtatttattttgctaccgaccacaacccaagctcctccacgaagctctccagccataggaatgta

SEQ ID NO: 709 - DNA, 101 bp, synthetic construct
  misc_feature 1..101: note = Synthetic
  source 1..101: mol_type = other DNA
ttggcagtcctttcagcataacactcaatgcggtcagtatttattttgctgccgaccacaacccaagctcctccacgaagctctccagccataggaatgta

SEQ ID NO: 710 - DNA, 101 bp, synthetic construct
  misc_feature 1..101: note = Synthetic
  source 1..101: mol_type = other DNA
ttggcagtcctttcagcataacactcaatgcggtcagtatttattttgcttccgaccacaacccaagctcctccacgaagctctccagccataggaatgta

SEQ ID NO: 711 - DNA, 101 bp, synthetic construct
  misc_feature 1..101: note = Synthetic
  source 1..101: mol_type = other DNA
ttggcagtcctttcagcataacactcaatgcggtcagtatttattttgctcccgaccacaacccaagctcctccacgaagctctccagccataggaatgta

SEQ ID NO: 712 - DNA, 101 bp, synthetic construct
  misc_feature 1..101: note = Synthetic
  source 1..101: mol_type = other DNA
ttggcagtcctttcagcataacactcaatgcggtcggtatttattttgctaccgaccacaacccaagctcctccacgaagctctccagccataggaatgta

SEQ ID NO: 713 - DNA, 101 bp, synthetic construct
  misc_feature 1..101: note = Synthetic
  source 1..101: mol_type = other DNA
ttggcagtcctttcagcataacactcaatgcggtcggtatttattttgctgccgaccacaacccaagctcctccacgaagctctccagccataggaatgta

SEQ ID NO: 714 - DNA, 101 bp, synthetic construct
  misc_feature 1..101: note = Synthetic
  source 1..101: mol_type = other DNA
ttggcagtcctttcagcataacactcaatgcggtcggtatttattttgcttccgaccacaacccaagctcctccacgaagctctccagccataggaatgta

SEQ ID NO: 715 - DNA, 101 bp, synthetic construct
  misc_feature 1..101: note = Synthetic
  source 1..101: mol_type = other DNA
ttggcagtcctttcagcataacactcaatgcggtcggtatttattttgctcccgaccacaacccaagctcctccacgaagctctccagccataggaatgta

SEQ ID NO: 716 - DNA, 101 bp, synthetic construct
  misc_feature 1..101: note = Synthetic
  source 1..101: mol_type = other DNA
ttggcagtcctttcagcataacactcaatgcggtctgtatttattttgctaccgaccacaacccaagctcctccacgaagctctccagccataggaatgta

SEQ ID NO: 717 - DNA, 101 bp, synthetic construct
  misc_feature 1..101: note = Synthetic
  source 1..101: mol_type = other DNA
ttggcagtcctttcagcataacactcaatgcggtctgtatttattttgctgccgaccacaacccaagctcctccacgaagctctccagccataggaatgta

SEQ ID NO: 718 - DNA, 101 bp, synthetic construct
  misc_feature 1..101: note = Synthetic
  source 1..101: mol_type = other DNA
ttggcagtcctttcagcataacactcaatgcggtctgtatttattttgcttccgaccacaacccaagctcctccacgaagctctccagccataggaatgta

SEQ ID NO: 719 - DNA, 101 bp, synthetic construct
  misc_feature 1..101: note = Synthetic
  source 1..101: mol_type = other DNA
ttggcagtcctttcagcataacactcaatgcggtctgtatttattttgctcccgaccacaacccaagctcctccacgaagctctccagccataggaatgta

SEQ ID NO: 720 - DNA, 101 bp, synthetic construct
  misc_feature 1..101: note = Synthetic
  source 1..101: mol_type = other DNA
ttggcagtcctttcagcataacactcaatgcggtccgtatttattttgctaccgaccacaacccaagctcctccacgaagctctccagccataggaatgta

SEQ ID NO: 721 - DNA, 101 bp, synthetic construct
  misc_feature 1..101: note = Synthetic
  source 1..101: mol_type = other DNA
ttggcagtcctttcagcataacactcaatgcggtccgtatttattttgctgccgaccacaacccaagctcctccacgaagctctccagccataggaatgta

SEQ ID NO: 722 - DNA, 101 bp, synthetic construct
  misc_feature 1..101: note = Synthetic
  source 1..101: mol_type = other DNA
ttggcagtcctttcagcataacactcaatgcggtccgtatttattttgcttccgaccacaacccaagctcctccacgaagctctccagccataggaatgta

SEQ ID NO: 723 - DNA, 101 bp, synthetic construct
  misc_feature 1..101: note = Synthetic
  source 1..101: mol_type = other DNA
ttggcagtcctttcagcataacactcaatgcggtccgtatttattttgctcccgaccacaacccaagctcctccacgaagctctccagccataggaatgta

SEQ ID NO: 724 - DNA, 201 bp, synthetic construct
  misc_feature 1..201: note = Synthetic
  source 1..201: mol_type = other DNA
ctgacctgaacttgatttcaattaacccttgaggttcgagaacattacctttggcagtcctttcagcataacactcaatgcggtctggatttattttgctaccgaccacaacccaagctcctccacgaagctctccagccataggaatgtacacaaaagcaggctgattatatgtcctaaggttctcgacaattgttgacc

SEQ ID NO: 725 - DNA, 201 bp, synthetic construct
  misc_feature 1..201: note = Synthetic
  source 1..201: mol_type = other DNA
ctgacctgaacttgatttcaattaacccttgaggttcgagaacattacctttggcagtcctttcagcataacactcaatgcggtctggatttattttgctgccgaccacaacccaagctcctccacgaagctctccagccataggaatgtacacaaaagcaggctgattatatgtcctaaggttctcgacaattgttgacc

SEQ ID NO: 726 - DNA, 201 bp, synthetic construct
  misc_feature 1..201: note = Synthetic
  source 1..201: mol_type = other DNA
ctgacctgaacttgatttcaattaacccttgaggttcgagaacattacctttggcagtcctttcagcataacactcaatgcggtctggatttattttgcttccgaccacaacccaagctcctccacgaagctctccagccataggaatgtacacaaaagcaggctgattatatgtcctaaggttctcgacaattgttgacc

SEQ ID NO: 727 - DNA, 201 bp, synthetic construct
  misc_feature 1..201: note = Synthetic
  source 1..201: mol_type = other DNA
ctgacctgaacttgatttcaattaacccttgaggttcgagaacattacctttggcagtcctttcagcataacactcaatgcggtctggatttattttgctcccgaccacaacccaagctcctccacgaagctctccagccataggaatgtacacaaaagcaggctgattatatgtcctaaggttctcgacaattgttgacc

SEQ ID NO: 728 - DNA, 201 bp, synthetic construct
  misc_feature 1..201: note = Synthetic
  source 1..201: mol_type = other DNA
ctgacctgaacttgatttcaattaacccttgaggttcgagaacattacctttggcagtcctttcagcataacactcaatgcggtcagtatttattttgctatcgaccacaacccaagctcctccacgaagctctccagccataggaatgtacacaaaagcaggctgattatatgtcctaaggttctcgacaattgttgacc

SEQ ID NO: 729 - DNA, 201 bp, synthetic construct
  misc_feature 1..201: note = Synthetic
  source 1..201: mol_type = other DNA
ctgacctgaacttgatttcaattaacccttgaggttcgagaacattacctttggcagtcctttcagcataacactcaatgcggtcggtatttattttgctatcgaccacaacccaagctcctccacgaagctctccagccataggaatgtacacaaaagcaggctgattatatgtcctaaggttctcgacaattgttgacc

SEQ ID NO: 730 - DNA, 201 bp, synthetic construct
  misc_feature 1..201: note = Synthetic
  source 1..201: mol_type = other DNA
ctgacctgaacttgatttcaattaacccttgaggttcgagaacattacctttggcagtcctttcagcataacactcaatgcggtctgtatttattttgctatcgaccacaacccaagctcctccacgaagctctccagccataggaatgtacacaaaagcaggctgattatatgtcctaaggttctcgacaattgttgacc

SEQ ID NO: 731 - DNA, 201 bp, synthetic construct
  misc_feature 1..201: note = Synthetic
  source 1..201: mol_type = other DNA
ctgacctgaacttgatttcaattaacccttgaggttcgagaacattacctttggcagtcctttcagcataacactcaatgcggtccgtatttattttgctatcgaccacaacccaagctcctccacgaagctctccagccataggaatgtacacaaaagcaggctgattatatgtcctaaggttctcgacaattgttgacc

SEQ ID NO: 732 - DNA, 201 bp, synthetic construct
  misc_feature 1..201: note = Synthetic
  source 1..201: mol_type = other DNA
ctgacctgaacttgatttcaattaacccttgaggttcgagaacattacctttggcagtcctttcagcataacactcaatgcggtcagtatttattttgctaccgaccacaacccaagctcctccacgaagctctccagccataggaatgtacacaaaagcaggctgattatatgtcctaaggttctcgacaattgttgacc

SEQ ID NO: 733 - DNA, 201 bp, synthetic construct
  misc_feature 1..201: note = Synthetic
  source 1..201: mol_type = other DNA
ctgacctgaacttgatttcaattaacccttgaggttcgagaacattacctttggcagtcctttcagcataacactcaatgcggtcagtatttattttgctgccgaccacaacccaagctcctccacgaagctctccagccataggaatgtacacaaaagcaggctgattatatgtcctaaggttctcgacaattgttgacc

SEQ ID NO: 734 - DNA, 201 bp, synthetic construct
  misc_feature 1..201: note = Synthetic
  source 1..201: mol_type = other DNA
ctgacctgaacttgatttcaattaacccttgaggttcgagaacattacctttggcagtcctttcagcataacactcaatgcggtcagtatttattttgcttccgaccacaacccaagctcctccacgaagctctccagccataggaatgtacacaaaagcaggctgattatatgtcctaaggttctcgacaattgttgacc

SEQ ID NO: 735 - DNA, 201 bp, synthetic construct
  misc_feature 1..201: note = Synthetic
  source 1..201: mol_type = other DNA
ctgacctgaacttgatttcaattaacccttgaggttcgagaacattacctttggcagtcctttcagcataacactcaatgcggtcagtatttattttgctcccgaccacaacccaagctcctccacgaagctctccagccataggaatgtacacaaaagcaggctgattatatgtcctaaggttctcgacaattgttgacc

SEQ ID NO: 736 - DNA, 201 bp, synthetic construct
  misc_feature 1..201: note = Synthetic
  source 1..201: mol_type = other DNA
ctgacctgaacttgatttcaattaacccttgaggttcgagaacattacctttggcagtcctttcagcataacactcaatgcggtcggtatttattttgctaccgaccacaacccaagctcctccacgaagctctccagccataggaatgtacacaaaagcaggctgattatatgtcctaaggttctcgacaattgttgacc

SEQ ID NO: 737 - DNA, 201 bp, synthetic construct
  misc_feature 1..201: note = Synthetic
  source 1..201: mol_type = other DNA
ctgacctgaacttgatttcaattaacccttgaggttcgagaacattacctttggcagtcctttcagcataacactcaatgcggtcggtatttattttgctgccgaccacaacccaagctcctccacgaagctctccagccataggaatgtacacaaaagcaggctgattatatgtcctaaggttctcgacaattgttgacc

SEQ ID NO: 738 - DNA, 201 bp, synthetic construct
  misc_feature 1..201: note = Synthetic
  source 1..201: mol_type = other DNA
ctgacctgaacttgatttcaattaacccttgaggttcgagaacattacctttggcagtcctttcagcataacactcaatgcggtcggtatttattttgcttccgaccacaacccaagctcctccacgaagctctccagccataggaatgtacacaaaagcaggctgattatatgtcctaaggttctcgacaattgttgacc

SEQ ID NO: 739 - DNA, 201 bp, synthetic construct
  misc_feature 1..201: note = Synthetic
  source 1..201: mol_type = other DNA
ctgacctgaacttgatttcaattaacccttgaggttcgagaacattacctttggcagtcctttcagcataacactcaatgcggtcggtatttattttgctcccgaccacaacccaagctcctccacgaagctctccagccataggaatgtacacaaaagcaggctgattatatgtcctaaggttctcgacaattgttgacc

SEQ ID NO: 740 - DNA, 201 bp, synthetic construct
  misc_feature 1..201: note = Synthetic
  source 1..201: mol_type = other DNA
ctgacctgaacttgatttcaattaacccttgaggttcgagaacattacctttggcagtcctttcagcataacactcaatgcggtctgtatttattttgctaccgaccacaacccaagctcctccacgaagctctccagccataggaatgtacacaaaagcaggctgattatatgtcctaaggttctcgacaattgttgacc

SEQ ID NO: 741 - DNA, 201 bp, synthetic construct
  misc_feature 1..201: note = Synthetic
  source 1..201: mol_type = other DNA
ctgacctgaacttgatttcaattaacccttgaggttcgagaacattacctttggcagtcctttcagcataacactcaatgcggtctgtatttattttgctgccgaccacaacccaagctcctccacgaagctctccagccataggaatgtacacaaaagcaggctgattatatgtcctaaggttctcgacaattgttgacc

SEQ ID NO: 742 - DNA, 201 bp, synthetic construct
  misc_feature 1..201: note = Synthetic
  source 1..201: mol_type = other DNA
ctgacctgaacttgatttcaattaacccttgaggttcgagaacattacctttggcagtcctttcagcataacactcaatgcggtctgtatttattttgcttccgaccacaacccaagctcctccacgaagctctccagccataggaatgtacacaaaagcaggctgattatatgtcctaaggttctcgacaattgttgacc

SEQ ID NO: 743 - DNA, 201 bp, synthetic construct
  misc_feature 1..201: note = Synthetic
  source 1..201: mol_type = other DNA
ctgacctgaacttgatttcaattaacccttgaggttcgagaacattacctttggcagtcctttcagcataacactcaatgcggtctgtatttattttgctcccgaccacaacccaagctcctccacgaagctctccagccataggaatgtacacaaaagcaggctgattatatgtcctaaggttctcgacaattgttgacc

SEQ ID NO: 744 - DNA, 201 bp, synthetic construct
  misc_feature 1..201: note = Synthetic
  source 1..201: mol_type = other DNA
ctgacctgaacttgatttcaattaacccttgaggttcgagaacattacctttggcagtcctttcagcataacactcaatgcggtccgtatttattttgctaccgaccacaacccaagctcctccacgaagctctccagccataggaatgtacacaaaagcaggctgattatatgtcctaaggttctcgacaattgttgacc

SEQ ID NO: 745 - DNA, 201 bp, synthetic construct
  misc_feature 1..201: note = Synthetic
  source 1..201: mol_type = other DNA
ctgacctgaacttgatttcaattaacccttgaggttcgagaacattacctttggcagtcctttcagcataacactcaatgcggtccgtatttattttgctgccgaccacaacccaagctcctccacgaagctctccagccataggaatgtacacaaaagcaggctgattatatgtcctaaggttctcgacaattgttgacc

SEQ ID NO: 746 - DNA, 201 bp, synthetic construct
  misc_feature 1..201: note = Synthetic
  source 1..201: mol_type = other DNA
ctgacctgaacttgatttcaattaacccttgaggttcgagaacattacctttggcagtcctttcagcataacactcaatgcggtccgtatttattttgcttccgaccacaacccaagctcctccacgaagctctccagccataggaatgtacacaaaagcaggctgattatatgtcctaaggttctcgacaattgttgacc

SEQ ID NO: 747 - DNA, 201 bp, synthetic construct
  misc_feature 1..201: note = Synthetic
  source 1..201: mol_type = other DNA
ctgacctgaacttgatttcaattaacccttgaggttcgagaacattacctttggcagtcctttcagcataacactcaatgcggtccgtatttattttgctcccgaccacaacccaagctcctccacgaagctctccagccataggaatgtacacaaaagcaggctgattatatgtcctaaggttctcgacaattgttgacc

SEQ ID NO: 748 - DNA, 101 bp, synthetic construct
  misc_feature 1..101: note = Synthetic
  source 1..101: mol_type = other DNA
tacattcctatggctggagagcttcgtggaggagcttgggttgtgatcggtagcaaaataaatacagaccgcattgagtgttatgctgagaggactgccaa

SEQ ID NO: 749 - DNA, 101 bp, synthetic construct
  misc_feature 1..101: note = Synthetic
  source 1..101: mol_type = other DNA
ttggcagtcctctcagcataacactcaatgcggtctgtatttattttgctaccgatcacaacccaagctcctccacgaagctctccagccataggaatgta

SEQ ID NO: 750 - DNA, 101 bp, synthetic construct
  misc_feature 1..101: note = Synthetic
  variation 51: note = n is a, c, g, or t
  variation 66: note = n is a, c, g, or t
  source 1..101: mol_type = other DNA
tacattcctatggctggagagcttcgtggaggagcttgggttgtgatcggnagcaaaataaatacngaccgcattgagtgttatgctgagaggactgccaa

SEQ ID NO: 751 - DNA, 101 bp, synthetic construct
  misc_feature 1..101: note = Synthetic
  variation 36: note = n is a, c, g, or t
  variation 51: note = n is a, c, g, or t
  source 1..101: mol_type = other DNA
ttggcagtcctctcagcataacactcaatgcggtcngtatttattttgctnccgatcacaacccaagctcctccacgaagctctccagccataggaatgta

SEQ ID NO: 752 - DNA, 101 bp, synthetic construct
  misc_feature 1..101: note = Synthetic
  variation 51: note = n is a, c, g, or t
  variation 66: note = n is a, c, g, or t
  source 1..101: mol_type = other DNA
tacattcctatggctggagagcttcgtggaggagcttgggttgtggtcggnagcaaaataaatacngaccgcattgagtgttatgctgaaaggactgccaa

SEQ ID NO: 753 - DNA, 101 bp, synthetic construct
  misc_feature 1..101: note = Synthetic
  variation 36: note = n is a, c, g, or t
  variation 51: note = n is a, c, g, or t
  source 1..101: mol_type = other DNA
ttggcagtcctttcagcataacactcaatgcggtcngtatttattttgctnccgaccacaacccaagctcctccacgaagctctccagccataggaatgta

SEQ ID NO: 754 - DNA, 20 bp, synthetic construct
  misc_feature 1..20: note = Synthetic
  source 1..20: mol_type = other DNA
ggttaattgaaatcaagttc

SEQ ID NO: 755 - DNA, 20 bp, synthetic construct
  misc_feature 1..20: note = Synthetic
  source 1..20: mol_type = other DNA
ttgatttcaattaacccttg

SEQ ID NO: 756 - DNA, 20 bp, synthetic construct
  misc_feature 1..20: note = Synthetic
  source 1..20: mol_type = other DNA
gtaatgttctcgaacctcaa

SEQ ID NO: 757 - DNA, 20 bp, synthetic construct
  misc_feature 1..20: note = Synthetic
  source 1..20: mol_type = other DNA
ggtaatgttctcgaacctca

SEQ ID NO: 758 - DNA, 20 bp, synthetic construct
  misc_feature 1..20: note = Synthetic
  source 1..20: mol_type = other DNA
aggttcgagaacattacctt

SEQ ID NO: 759 - DNA, 20 bp, synthetic construct
  misc_feature 1..20: note = Synthetic
  source 1..20: mol_type = other DNA
tatgctgagaggactgccaa

SEQ ID NO: 760 - DNA, 20 bp, synthetic construct
  misc_feature 1..20: note = Synthetic
  source 1..20: mol_type = other DNA
gcattgagtgttatgctgag

SEQ ID NO: 761 - DNA, 20 bp, synthetic construct
  misc_feature 1..20: note = Synthetic
  source 1..20: mol_type = other DNA
tctcagcataacactcaatg

SEQ ID NO: 762 - DNA, 20 bp, synthetic construct
  misc_feature 1..20: note = Synthetic
  source 1..20: mol_type = other DNA
gcataacactcaatgcggtc

SEQ ID NO: 763 - DNA, 20 bp, synthetic construct
  misc_feature 1..20: note = Synthetic
  source 1..20: mol_type = other DNA
tcgtggaggagcttgggttg

SEQ ID NO: 764 - DNA, 20 bp, synthetic construct
  misc_feature 1..20: note = Synthetic
  source 1..20: mol_type = other DNA
agagcttcgtggaggagctt

SEQ ID NO: 765 - DNA, 20 bp, synthetic construct
  misc_feature 1..20: note = Synthetic
  source 1..20: mol_type = other DNA
gagagcttcgtggaggagct

SEQ ID NO: 766 - DNA, 20 bp, synthetic construct
  misc_feature 1..20: note = Synthetic
  source 1..20: mol_type = other DNA
atggctggagagcttcgtgg

SEQ ID NO: 767 - DNA, 20 bp, synthetic construct
  misc_feature 1..20: note = Synthetic
  source 1..20: mol_type = other DNA
cctatggctggagagcttcg

SEQ ID NO: 768 - DNA, 20 bp, synthetic construct
  misc_feature 1..20: note = Synthetic
  source 1..20: mol_type = other DNA
ccacgaagctctccagccat

SEQ ID NO: 769 - DNA, 20 bp, synthetic construct
  misc_feature 1..20: note = Synthetic
  source 1..20: mol_type = other DNA
tttgtctacattcctatggc

SEQ ID NO: 770 - DNA, 20 bp, synthetic construct
  misc_feature 1..20: note = Synthetic
  source 1..20: mol_type = other DNA
tgcgtttgtctacattccta

SEQ ID NO: 771 - DNA, 20 bp, synthetic construct
  misc_feature 1..20: note = Synthetic
  source 1..20: mol_type = other DNA
ataggaatgtagacaaacgc

SEQ ID NO: 772 - DNA, 20 bp, synthetic construct
  misc_feature 1..20: note = Synthetic
  source 1..20: mol_type = other DNA
caggctgattatatgtccta

SEQ ID NO: 773 - DNA, 20 bp, synthetic construct
  misc_feature 1..20: note = Synthetic
  source 1..20: mol_type = other DNA
caacaattgtcgagaacctt

SEQ ID NO: 774 - DNA, 24 bp, synthetic construct
  misc_feature 1..24: note = Synthetic
  source 1..24: mol_type = other DNA
aattaacccttgaggttcgagaac

SEQ ID NO: 775 - DNA, 24 bp, synthetic construct
  misc_feature 1..24: note = Synthetic
  source 1..24: mol_type = other DNA
gcagtcctctcagcataacactca

SEQ ID NO: 776 - DNA, 24 bp, synthetic construct
  misc_feature 1..24: note = Synthetic
  source 1..24: mol_type = other DNA
ttttgctatcgaccacaacccaag

SEQ ID NO: 777 - DNA, 24 bp, synthetic construct
  misc_feature 1..24: note = Synthetic
  source 1..24: mol_type = other DNA
gctatcgaccacaacccaagctcc

SEQ ID NO: 778 - DNA, 24 bp, synthetic construct
  misc_feature 1..24: note = Synthetic
  source 1..24: mol_type = other DNA
ctatcgaccacaacccaagctcct

SEQ ID NO: 779 - DNA, 24 bp, synthetic construct
  misc_feature 1..24: note = Synthetic
  source 1..24: mol_type = other DNA
tctacattcctatggctggagagc

SEQ ID NO: 780 - DNA, 20 bp, synthetic construct
  misc_feature 1..20: note = Synthetic
  source 1..20: mol_type = other DNA
gaacttgatttcaattaacc

SEQ ID NO: 781 - DNA, 20 bp, synthetic construct
  misc_feature 1..20: note = Synthetic
  source 1..20: mol_type = other DNA
caagggttaattgaaatcaa

SEQ ID NO: 782 - DNA, 20 bp, synthetic construct
  misc_feature 1..20: note = Synthetic
  source 1..20: mol_type = other DNA
ttgaggttcgagaacattac

SEQ ID NO: 783 - DNA, 20 bp, synthetic construct
  misc_feature 1..20: note = Synthetic
  source 1..20: mol_type = other DNA
tgaggttcgagaacattacc

SEQ ID NO: 784 - DNA, 20 bp, synthetic construct
  misc_feature 1..20: note = Synthetic
  source 1..20: mol_type = other DNA
aaggtaatgttctcgaacct

SEQ ID NO: 785 - DNA, 20 bp, synthetic construct
  misc_feature 1..20: note = Synthetic
  source 1..20: mol_type = other DNA
ttggcagtcctctcagcata

SEQ ID NO: 786 - DNA, 20 bp, synthetic construct
  misc_feature 1..20: note = Synthetic
  source 1..20: mol_type = other DNA
ctcagcataacactcaatgc

SEQ ID NO: 787 - DNA, 20 bp, synthetic construct
  misc_feature 1..20: note = Synthetic
  source 1..20: mol_type = other DNA
cattgagtgttatgctgaga

SEQ ID NO: 788 - DNA, 20 bp, synthetic construct
  misc_feature 1..20: note = Synthetic
  source 1..20: mol_type = other DNA
gaccgcattgagtgttatgc

SEQ ID NO: 789 - DNA, 20 bp, synthetic construct
  misc_feature 1..20: note = Synthetic
  source 1..20: mol_type = other DNA
caacccaagctcctccacga

SEQ ID NO: 790 - DNA, 20 bp, synthetic construct
  misc_feature 1..20: note = Synthetic
  source 1..20: mol_type = other DNA
aagctcctccacgaagctct

SEQ ID NO: 791 - DNA, 20 bp, synthetic construct
  misc_feature 1..20: note = Synthetic
  source 1..20: mol_type = other DNA
agctcctccacgaagctctc

SEQ ID NO: 792 - DNA, 20 bp, synthetic construct
  misc_feature 1..20: note = Synthetic
  source 1..20: mol_type = other DNA
ccacgaagctctccagccat

SEQ ID NO: 793 - DNA, 20 bp, synthetic construct
  misc_feature 1..20: note = Synthetic
  source 1..20: mol_type = other DNA
cgaagctctccagccatagg

SEQ ID NO: 794 - DNA, 20 bp, synthetic construct
  misc_feature 1..20: note = Synthetic
  source 1..20: mol_type = other DNA
atggctggagagcttcgtgg

SEQ ID NO: 795 - DNA, 20 bp, synthetic construct
  misc_feature 1..20: note = Synthetic
  source 1..20: mol_type = other DNA
gccataggaatgtagacaaa

SEQ ID NO: 796 - DNA, 20 bp, synthetic construct
  misc_feature 1..20: note = Synthetic
  source 1..20: mol_type = other DNA
taggaatgtagacaaacgca

SEQ ID NO: 797 - DNA, 20 bp, synthetic construct
  misc_feature 1..20: note = Synthetic
  source 1..20: mol_type = other DNA
gcgtttgtctacattcctat

SEQ ID NO: 798 - DNA, 20 bp, synthetic construct
  misc_feature 1..20: note = Synthetic
  source 1..20: mol_type = other DNA
taggacatataatcagcctg

SEQ ID NO: 799 - DNA, 20 bp, synthetic construct
  misc_feature 1..20: note = Synthetic
  source 1..20: mol_type = other DNA
aaggttctcgacaattgttg

SEQ ID NO: 800 - DNA, 24 bp, synthetic construct
  misc_feature 1..24: note = Synthetic
  source 1..24: mol_type = other DNA
gttctcgaacctcaagggttaatt

SEQ ID NO: 801 - DNA, 24 bp, synthetic construct
  misc_feature 1..24: note = Synthetic
  source 1..24: mol_type = other DNA
tgagtgttatgctgagaggactgc

SEQ ID NO: 802 - DNA, 24 bp, synthetic construct
  misc_feature 1..24: note = Synthetic
  source 1..24: mol_type = other DNA
cttgggttgtggtcgatagcaaaa

SEQ ID NO: 803 - DNA, 24 bp, synthetic construct
  misc_feature 1..24: note = Synthetic
  source 1..24: mol_type = other DNA
ggagcttgggttgtggtcgatagc

SEQ ID NO: 804 - DNA, 24 bp, synthetic construct
  misc_feature 1..24: note = Synthetic
  source 1..24: mol_type = other DNA
aggagcttgggttgtggtcgatag

SEQ ID NO: 805 - DNA, 24 bp, synthetic construct
  misc_feature 1..24: note = Synthetic
  source 1..24: mol_type = other DNA
gctctccagccataggaatgtaga

SEQ ID NO: 806 - DNA, 101 bp, synthetic construct
  misc_feature 1..101: note = Synthetic
  source 1..101: mol_type = other DNA
tacattcctatggctggagagcttcgtggaggagcttgggttgtggtcggtagcaaaataaatccagaccgcattgagtgttatgctgagaggactgccaa

SEQ ID NO: 807 - DNA, 101 bp, synthetic construct
  misc_feature 1..101: note = Synthetic
  source 1..101: mol_type = other DNA
tacattcctatggctggagagcttcgtggaggagcttgggttgtggtcggcagcaaaataaatccagaccgcattgagtgttatgctgagaggactgccaa

SEQ ID NO: 808 - DNA, 101 bp, synthetic construct
  misc_feature 1..101: note = Synthetic
  source 1..101: mol_type = other DNA
tacattcctatggctggagagcttcgtggaggagcttgggttgtggtcggaagcaaaataaatccagaccgcattgagtgttatgctgagaggactgccaa

SEQ ID NO: 809 - DNA, 101 bp, synthetic construct
  misc_feature 1..101: note = Synthetic
  source 1..101: mol_type = other DNA
tacattcctatggctggagagcttcgtggaggagcttgggttgtggtcgggagcaaaataaatccagaccgcattgagtgttatgctgagaggactgccaa

SEQ ID NO: 810 - DNA, 101 bp, synthetic construct
  misc_feature 1..101: note = Synthetic
  source 1..101: mol_type = other DNA
tacattcctatggctggagagcttcgtggaggagcttgggttgtggtcgatagcaaaataaatactgaccgcattgagtgttatgctgagaggactgccaa

SEQ ID NO: 811 - DNA, 101 bp, synthetic construct
  misc_feature 1..101: note = Synthetic
  source 1..101: mol_type = other DNA
tacattcctatggctggagagcttcgtggaggagcttgggttgtggtcgatagcaaaataaataccgaccgcattgagtgttatgctgagaggactgccaa

SEQ ID NO: 812 - DNA, 101 bp, synthetic construct
  misc_feature 1..101: note = Synthetic
  source 1..101: mol_type = other DNA
tacattcctatggctggagagcttcgtggaggagcttgggttgtggtcgatagcaaaataaatacagaccgcattgagtgttatgctgagaggactgccaa

SEQ ID NO: 813 - DNA, 101 bp, synthetic construct
  misc_feature 1..101: note = Synthetic
  source 1..101: mol_type = other DNA
tacattcctatggctggagagcttcgtggaggagcttgggttgtggtcgatagcaaaataaatacggaccgcattgagtgttatgctgagaggactgccaa

SEQ ID NO: 814 - DNA, 101 bp, synthetic construct
  misc_feature 1..101: note = Synthetic
  source 1..101: mol_type = other DNA
tacattcctatggctggagagcttcgtggaggagcttgggttgtggtcggtagcaaaataaatactgaccgcattgagtgttatgctgagaggactgccaa

SEQ ID NO: 815 - DNA, 101 bp, synthetic construct
  misc_feature 1..101: note = Synthetic
  source 1..101: mol_type = other DNA
tacattcctatggctggagagcttcgtggaggagcttgggttgtggtcggcagcaaaataaatactgaccgcattgagtgttatgctgagaggactgccaa

SEQ ID NO: 816 - DNA, 101 bp, synthetic construct
  misc_feature 1..101: note = Synthetic
  source 1..101: mol_type = other DNA
tacattcctatggctggagagcttcgtggaggagcttgggttgtggtcggaagcaaaataaatactgaccgcattgagtgttatgctgagaggactgccaa

SEQ ID NO: 817 - DNA, 101 bp, synthetic construct
  misc_feature 1..101: note = Synthetic
  source 1..101: mol_type = other DNA
tacattcctatggctggagagcttcgtggaggagcttgggttgtggtcgggagcaaaataaatactgaccgcattgagtgttatgctgagaggactgccaa

SEQ ID NO: 818 - DNA, 101 bp, synthetic construct
  misc_feature 1..101: note = Synthetic
  source 1..101: mol_type = other DNA
tacattcctatggctggagagcttcgtggaggagcttgggttgtggtcggtagcaaaataaataccgaccgcattgagtgttatgctgagaggactgccaa

SEQ ID NO: 819 - DNA, 101 bp, synthetic construct
  misc_feature 1..101: note = Synthetic
  source 1..101: mol_type = other DNA
tacattcctatggctggagagcttcgtggaggagcttgggttgtggtcggcagcaaaataaataccgaccgcattgagtgttatgctgagaggactgccaa

SEQ ID NO: 820 - DNA, 101 bp, synthetic construct
  misc_feature 1..101: note = Synthetic
  source 1..101: mol_type = other DNA
tacattcctatggctggagagcttcgtggaggagcttgggttgtggtcggaagcaaaataaataccgaccgcattgagtgttatgctgagaggactgccaa

SEQ ID NO: 821 - DNA, 101 bp, synthetic construct
  misc_feature 1..101: note = Synthetic
  source 1..101: mol_type = other DNA
tacattcctatggctggagagcttcgtggaggagcttgggttgtggtcgggagcaaaataaataccgaccgcattgagtgttatgctgagaggactgccaa

SEQ ID NO: 822 - DNA, 101 bp, synthetic construct
  misc_feature 1..101: note = Synthetic
  source 1..101: mol_type = other DNA
tacattcctatggctggagagcttcgtggaggagcttgggttgtggtcggtagcaaaataaatacagaccgcattgagtgttatgctgagaggactgccaa

SEQ ID NO: 823 - DNA, 101 bp, synthetic construct
  misc_feature 1..101: note = Synthetic
  source 1..101: mol_type = other DNA
tacattcctatggctggagagcttcgtggaggagcttgggttgtggtcggcagcaaaataaatacagaccgcattgagtgttatgctgagaggactgccaa

SEQ ID NO: 824 - DNA, 101 bp, synthetic construct
  misc_feature 1..101: note = Synthetic
  source 1..101: mol_type = other DNA
tacattcctatggctggagagcttcgtggaggagcttgggttgtggtcggaagcaaaataaatacagaccgcattgagtgttatgctgagaggactgccaa

SEQ ID NO: 825 - DNA, 101 bp, synthetic construct
  misc_feature 1..101: note = Synthetic
  source 1..101: mol_type = other DNA
tacattcctatggctggagagcttcgtggaggagcttgggttgtggtcgggagcaaaataaatacagaccgcattgagtgttatgctgagaggactgccaa

SEQ ID NO: 826 - DNA, 101 bp, synthetic construct
  misc_feature 1..101: note = Synthetic
  source 1..101: mol_type = other DNA
tacattcctatggctggagagcttcgtggaggagcttgggttgtggtcggtagcaaaataaatacggaccgcattgagtgttatgctgagaggactgccaa

SEQ ID NO: 827 - DNA, 101 bp, synthetic construct
  misc_feature 1..101: note = Synthetic
  source 1..101: mol_type = other DNA
tacattcctatggctggagagcttcgtggaggagcttgggttgtggtcggcagcaaaataaatacggaccgcattgagtgttatgctgagaggactgccaa

SEQ ID NO: 828 - DNA, 101 bp, synthetic construct
  misc_feature 1..101: note = Synthetic
  source 1..101: mol_type = other DNA
tacattcctatggctggagagcttcgtggaggagcttgggttgtggtcggaagcaaaataaatacggaccgcattgagtgttatgctgagaggactgccaa

SEQ ID NO: 829 - DNA, 101 bp, synthetic construct
  misc_feature 1..101: note = Synthetic
  source 1..101: mol_type = other DNA
tacattcctatggctggagagcttcgtggaggagcttgggttgtggtcgggagcaaaataaatacggaccgcattgagtgttatgctgagaggactgccaa

SEQ ID NO: 830 - DNA, 202 bp, synthetic construct
  misc_feature 1..202: note = Synthetic
  source 1..202: mol_type = other DNA
ggtcaacaattgtcgagaaccttaggacatataatcagcctgcgtttgtctacattcctatggctggagagcttcgtggaggagcttgggttgtggtcggtagcaaaataaatccagaccgcattgagtgttatgctgagaggactgccaaaggtaatgttctcgaacctcaagggttaattgaaatcaagttcaggtcaga

SEQ ID NO: 831 - DNA, 202 bp, synthetic construct
  misc_feature 1..202: note = Synthetic
  source 1..202: mol_type = other DNA
ggtcaacaattgtcgagaaccttaggacatataatcagcctgcgtttgtctacattcctatggctggagagcttcgtggaggagcttgggttgtggtcggcagcaaaataaatccagaccgcattgagtgttatgctgagaggactgccaaaggtaatgttctcgaacctcaagggttaattgaaatcaagttcaggtcaga

SEQ ID NO: 832 - DNA, 202 bp, synthetic construct
  misc_feature 1..202: note = Synthetic
  source 1..202: mol_type = other DNA
ggtcaacaattgtcgagaaccttaggacatataatcagcctgcgtttgtctacattcctatggctggagagcttcgtggaggagcttgggttgtggtcggaagcaaaataaatccagaccgcattgagtgttatgctgagaggactgccaaaggtaatgttctcgaacctcaagggttaattgaaatcaagttcaggtcaga

SEQ ID NO: 833 - DNA, 202 bp, synthetic construct
  misc_feature 1..202: note = Synthetic
  source 1..202: mol_type = other DNA
ggtcaacaattgtcgagaaccttaggacatataatcagcctgcgtttgtctacattcctatggctggagagcttcgtggaggagcttgggttgtggtcgggagcaaaataaatccagaccgcattgagtgttatgctgagaggactgccaaaggtaatgttctcgaacctcaagggttaattgaaatcaagttcaggtcaga

SEQ ID NO: 834 - DNA, 202 bp, synthetic construct
  misc_feature 1..202: note = Synthetic
  source 1..202: mol_type = other DNA
ggtcaacaattgtcgagaaccttaggacatataatcagcctgcgtttgtctacattcctatggctggagagcttcgtggaggagcttgggttgtggtcgatagcaaaataaatactgaccgcattgagtgttatgctgagaggactgccaaaggtaatgttctcgaacctcaagggttaattgaaatcaagttcaggtcaga

SEQ ID NO: 835 - DNA, 202 bp, synthetic construct
  misc_feature 1..202: note = Synthetic
  source 1..202: mol_type = other DNA
ggtcaacaattgtcgagaaccttaggacatataatcagcctgcgtttgtctacattcctatggctggagagcttcgtggaggagcttgggttgtggtcgatagcaaaataaataccgaccgcattgagtgttatgctgagaggactgccaaaggtaatgttctcgaacctcaagggttaattgaaatcaagttcaggtcaga

SEQ ID NO: 836 - DNA, 202 bp, synthetic construct
  misc_feature 1..202: note = Synthetic
  source 1..202: mol_type = other DNA
ggtcaacaattgtcgagaaccttaggacatataatcagcctgcgtttgtctacattcctatggctggagagcttcgtggaggagcttgggttgtggtcgatagcaaaataaatacagaccgcattgagtgttatgctgagaggactgccaaaggtaatgttctcgaacctcaagggttaattgaaatcaagttcaggtcaga

SEQ ID NO: 837 - DNA, 202 bp, synthetic construct
  misc_feature 1..202: note = Synthetic
  source 1..202: mol_type = other DNA
ggtcaacaattgtcgagaaccttaggacatataatcagcctgcgtttgtctacattcctatggctggagagcttcgtggaggagcttgggttgtggtcgatagcaaaataaatacggaccgcattgagtgttatgctgagaggactgccaaaggtaatgttctcgaacctcaagggttaattgaaatcaagttcaggtcaga

SEQ ID NO: 838 - DNA, 202 bp, synthetic construct
  misc_feature 1..202: note = Synthetic
  source 1..202: mol_type = other DNA
ggtcaacaattgtcgagaaccttaggacatataatcagcctgcgtttgtctacattcctatggctggagagcttcgtggaggagcttgggttgtggtcggtagcaaaataaatactgaccgcattgagtgttatgctgagaggactgccaaaggtaatgttctcgaacctcaagggttaattgaaatcaagttcaggtcaga

SEQ ID NO: 839 - DNA, 202 bp, synthetic construct
  misc_feature 1..202: note = Synthetic
  source 1..202: mol_type = other DNA
ggtcaacaattgtcgagaaccttaggacatataatcagcctgcgtttgtctacattcctatggctggagagcttcgtggaggagcttgggttgtggtcggcagcaaaataaatactgaccgcattgagtgttatgctgagaggactgccaaaggtaatgttctcgaacctcaagggttaattgaaatcaagttcaggtcaga

SEQ ID NO: 840 - DNA, 202 bp, synthetic construct
  misc_feature 1..202: note = Synthetic
  source 1..202: mol_type = other DNA
ggtcaacaattgtcgagaaccttaggacatataatcagcctgcgtttgtctacattcctatggctggagagcttcgtggaggagcttgggttgtggtcggaagcaaaataaatactgaccgcattgagtgttatgctgagaggactgccaaaggtaatgttctcgaacctcaagggttaattgaaatcaagttcaggtcaga

SEQ ID NO: 841 - DNA, 202 bp, synthetic construct
  misc_feature 1..202: note = Synthetic
  source 1..202: mol_type = other DNA
ggtcaacaattgtcgagaaccttaggacatataatcagcctgcgtttgtctacattcctatggctggagagcttcgtggaggagcttgggttgtggtcgggagcaaaataaatactgaccgcattgagtgttatgctgagaggactgccaaaggtaatgttctcgaacctcaagggttaattgaaatcaagttcaggtcaga

SEQ ID NO: 842 - DNA, 202 bp, synthetic construct
  misc_feature 1..202: note = Synthetic
  source 1..202: mol_type = other DNA
ggtcaacaattgtcgagaaccttaggacatataatcagcctgcgtttgtctacattcctatggctggagagcttcgtggaggagcttgggttgtggtcggtagcaaaataaataccgaccgcattgagtgttatgctgagaggactgccaaaggtaatgttctcgaacctcaagggttaattgaaatcaagttcaggtcaga

SEQ ID NO: 843 - DNA, 202 bp, synthetic construct
  misc_feature 1..202: note = Synthetic
  source 1..202: mol_type = other DNA
ggtcaacaattgtcgagaaccttaggacatataatcagcctgcgtttgtctacattcctatggctggagagcttcgtggaggagcttgggttgtggtcggcagcaaaataaataccgaccgcattgagtgttatgctgagaggactgccaaaggtaatgttctcgaacctcaagggttaattgaaatcaagttcaggtcaga

SEQ ID NO: 844 - DNA, 202 bp, synthetic construct
  misc_feature 1..202: note = Synthetic
  source 1..202: mol_type = other DNA
ggtcaacaattgtcgagaaccttaggacatataatcagcctgcgtttgtctacattcctatggctggagagcttcgtggaggagcttgggttgtggtcggaagcaaaataaataccgaccgcattgagtgttatgctgagaggactgccaaaggtaatgttctcgaacctcaagggttaattgaaatcaagttcaggtcaga

SEQ ID NO: 845 - DNA, 202 bp, synthetic construct
  misc_feature 1..202: note = Synthetic
  source 1..202: mol_type = other DNA
ggtcaacaattgtcgagaaccttaggacatataatcagcctgcgtttgtctacattcctatggctggagagcttcgtggaggagcttgggttgtggtcgggagcaaaataaataccgaccgcattgagtgttatgctgagaggactgccaaaggtaatgttctcgaacctcaagggttaattgaaatcaagttcaggtcaga

SEQ ID NO: 846 - DNA, 202 bp, synthetic construct
  misc_feature 1..202: note = Synthetic
  source 1..202: mol_type = other DNA
ggtcaacaattgtcgagaaccttaggacatataatcagcctgcgtttgtctacattcctatggctggagagcttcgtggaggagcttgggttgtggtcggtagcaaaataaatacagaccgcattgagtgttatgctgagaggactgccaaaggtaatgttctcgaacctcaagggttaattgaaatcaagttcaggtcaga

SEQ ID NO: 847 - DNA, 202 bp, synthetic construct
  misc_feature 1..202: note = Synthetic
  source 1..202: mol_type = other DNA
ggtcaacaattgtcgagaaccttaggacatataatcagcctgcgtttgtctacattcctatggctggagagcttcgtggaggagcttgggttgtggtcggcagcaaaataaatacagaccgcattgagtgttatgctgagaggactgccaaaggtaatgttctcgaacctcaagggttaattgaaatcaagttcaggtcaga

SEQ ID NO: 848 - DNA, 202 bp, synthetic construct
  misc_feature 1..202: note = Synthetic
  source 1..202: mol_type = other DNA
ggtcaacaattgtcgagaaccttaggacatataatcagcctgcgtttgtctacattcctatggctggagagcttcgtggaggagcttgggttgtggtcggaagcaaaataaatacagaccgcattgagtgttatgctgagaggactgccaaaggtaatgttctcgaacctcaagggttaattgaaatcaagttcaggtcaga

SEQ ID NO: 849 - DNA, 202 bp, synthetic construct
  misc_feature 1..202: note = Synthetic
  source 1..202: mol_type = other DNA
ggtcaacaattgtcgagaaccttaggacatataatcagcctgcgtttgtctacattcctatggctggagagcttcgtggaggagcttgggttgtggtcgggagcaaaataaatacagaccgcattgagtgttatgctgagaggactgccaaaggtaatgttctcgaacctcaagggttaattgaaatcaagttcaggtcaga

SEQ ID NO: 850 - DNA, 202 bp, synthetic construct
  misc_feature 1..202: note = Synthetic
  source 1..202: mol_type = other DNA
ggtcaacaattgtcgagaaccttaggacatataatcagcctgcgtttgtctacattcctatggctggagagcttcgtggaggagcttgggttgtggtcggtagcaaaataaatacggaccgcattgagtgttatgctgagaggactgccaaaggtaatgttctcgaacctcaagggttaattgaaatcaagttcaggtcaga

SEQ ID NO: 851 - DNA, 202 bp, synthetic construct
  misc_feature 1..202: note = Synthetic
  source 1..202: mol_type = other DNA
ggtcaacaattgtcgagaaccttaggacatataatcagcctgcgtttgtctacattcctatggctggagagcttcgtggaggagcttgggttgtggtcggcagcaaaataaatacggaccgcattgagtgttatgctgagaggactgccaaaggtaatgttctcgaacctcaagggttaattgaaatcaagttcaggtcaga

SEQ ID NO: 852 - DNA, 202 bp, synthetic construct
  misc_feature 1..202: note = Synthetic
  source 1..202: mol_type = other DNA
ggtcaacaattgtcgagaaccttaggacatataatcagcctgcgtttgtctacattcctatggctggagagcttcgtggaggagcttgggttgtggtcggaagcaaaataaatacggaccgcattgagtgttatgctgagaggactgccaaaggtaatgttctcgaacctcaagggttaattgaaatcaagttcaggtcaga

SEQ ID NO: 853 - DNA, 202 bp, synthetic construct
  misc_feature 1..202: note = Synthetic
  source 1..202: mol_type = other DNA
ggtcaacaattgtcgagaaccttaggacatataatcagcctgcgtttgtctacattcctatggctggagagcttcgtggaggagcttgggttgtggtcgggagcaaaataaatacggaccgcattgagtgttatgctgagaggactgccaaaggtaatgttctcgaacctcaagggttaattgaaatcaagttcaggtcaga

SEQ ID NO: 854 - DNA, 101 bp, synthetic construct
  misc_feature 1..101: note = Synthetic
  source 1..101: mol_type = other DNA
ttggcagtcctctcagcataacactcaatgcggtctggatttattttgctaccgaccacaacccaagctcctccacgaagctctccagccataggaatgta

SEQ ID NO: 855 - DNA, 101 bp, synthetic construct
  misc_feature 1..101: note = Synthetic
  source 1..101: mol_type = other DNA
ttggcagtcctctcagcataacactcaatgcggtctggatttattttgctgccgaccacaacccaagctcctccacgaagctctccagccataggaatgta

SEQ ID NO: 856 - DNA, 101 bp, synthetic construct
  misc_feature 1..101: note = Synthetic
  source 1..101: mol_type = other DNA
ttggcagtcctctcagcataacactcaatgcggtctggatttattttgcttccgaccacaacccaagctcctccacgaagctctccagccataggaatgta

SEQ ID NO: 857 - DNA, 101 bp, synthetic construct
  misc_feature 1..101: note = Synthetic
  source 1..101: mol_type = other DNA
ttggcagtcctctcagcataacactcaatgcggtctggatttattttgctcccgaccacaacccaagctcctccacgaagctctccagccataggaatgta

SEQ ID NO: 858 - DNA, 101 bp, synthetic construct
  misc_feature 1..101: note = Synthetic
  source 1..101: mol_type = other DNA
ttggcagtcctctcagcataacactcaatgcggtcagtatttattttgctatcgaccacaacccaagctcctccacgaagctctccagccataggaatgta

SEQ ID NO: 859 - DNA, 101 bp, synthetic construct
  misc_feature 1..101: note = Synthetic
  source 1..101: mol_type = other DNA
ttggcagtcctctcagcataacactcaatgcggtcggtatttattttgctatcgaccacaacccaagctcctccacgaagctctccagccataggaatgta

SEQ ID NO: 860 - DNA, 101 bp, synthetic construct
  misc_feature 1..101: note = Synthetic
  source 1..101: mol_type = other DNA
ttggcagtcctctcagcataacactcaatgcggtctgtatttattttgctatcgaccacaacccaagctcctccacgaagctctccagccataggaatgta

SEQ ID NO: 861 - DNA, 101 bp, synthetic construct
  misc_feature 1..101: note = Synthetic
  source 1..101: mol_type = other DNA
ttggcagtcctctcagcataacactcaatgcggtccgtatttattttgctatcgaccacaacccaagctcctccacgaagctctccagccataggaatgta

SEQ ID NO: 862 - DNA, 101 bp, synthetic construct
  misc_feature 1..101: note = Synthetic
  source 1..101: mol_type = other DNA
ttggcagtcctctcagcataacactcaatgcggtcagtatttattttgctaccgaccacaacccaagctcctccacgaagctctccagccataggaatgta

SEQ ID NO: 863 - DNA, 101 bp, synthetic construct
  misc_feature 1..101: note = Synthetic
  source 1..101: mol_type = other DNA
ttggcagtcctctcagcataacactcaatgcggtcagtatttattttgctgccgaccacaacccaagctcctccacgaagctctccagccataggaatgta

SEQ ID NO: 864 - DNA, 101 bp, synthetic construct
  misc_feature 1..101: note = Synthetic
  source 1..101: mol_type = other DNA
ttggcagtcctctcagcataacactcaatgcggtcagtatttattttgcttccgaccacaacccaagctcctccacgaagctctccagccataggaatgta

SEQ ID NO: 865 - DNA, 101 bp, synthetic construct
  misc_feature 1..101: note = Synthetic
  source 1..101: mol_type = other DNA
ttggcagtcctctcagcataacactcaatgcggtcagtatttattttgctcccgaccacaacccaagctcctccacgaagctctccagccataggaatgta

SEQ ID NO: 866 - DNA, 101 bp, synthetic construct
  misc_feature 1..101: note = Synthetic
  source 1..101: mol_type = other DNA
ttggcagtcctctcagcataacactcaatgcggtcggtatttattttgctaccgaccacaacccaagctcctccacgaagctctccagccataggaatgta

SEQ ID NO: 867 - DNA, 101 bp, synthetic construct
  misc_feature 1..101: note = Synthetic
  source 1..101: mol_type = other DNA
ttggcagtcctctcagcataacactcaatgcggtcggtatttattttgctgccgaccacaacccaagctcctccacgaagctctccagccataggaatgta

SEQ ID NO: 868 - DNA, 101 bp, synthetic construct
  misc_feature 1..101: note = Synthetic
  source 1..101: mol_type = other DNA
ttggcagtcctctcagcataacactcaatgcggtcggtatttattttgcttccgaccacaacccaagctcctccacgaagctctccagccataggaatgta

SEQ ID NO: 869 - DNA, 101 bp, synthetic construct
  misc_feature 1..101: note = Synthetic
  source 1..101: mol_type = other DNA
ttggcagtcctctcagcataacactcaatgcggtcggtatttattttgctcccgaccacaacccaagctcctccacgaagctctccagccataggaatgta

SEQ ID NO: 870 - DNA, 101 bp, synthetic construct
  misc_feature 1..101: note = Synthetic
  source 1..101: mol_type = other DNA
ttggcagtcctctcagcataacactcaatgcggtctgtatttattttgctaccgaccacaacccaagctcctccacgaagctctccagccataggaatgta

SEQ ID NO: 871 - DNA, 101 bp, synthetic construct
  misc_feature 1..101: note = Synthetic
  source 1..101: mol_type = other DNA
ttggcagtcctctcagcataacactcaatgcggtctgtatttattttgctgccgaccacaacccaagctcctccacgaagctctccagccataggaatgta

SEQ ID NO: 872 - DNA, 101 bp, synthetic construct
  misc_feature 1..101: note = Synthetic
  source 1..101: mol_type = other DNA
ttggcagtcctctcagcataacactcaatgcggtctgtatttattttgcttccgaccacaacccaagctcctccacgaagctctccagccataggaatgta

SEQ ID NO: 873 - DNA, 101 bp, synthetic construct
  misc_feature 1..101: note = Synthetic
  source 1..101: mol_type = other DNA
ttggcagtcctctcagcataacactcaatgcggtctgtatttattttgctcccgaccacaacccaagctcctccacgaagctctccagccataggaatgta

SEQ ID NO: 874 - DNA, 101 bp, synthetic construct
  misc_feature 1..101: note = Synthetic
  source 1..101: mol_type = other DNA
ttggcagtcctctcagcataacactcaatgcggtccgtatttattttgctaccgaccacaacccaagctcctccacgaagctctccagccataggaatgta

SEQ ID NO: 875 - DNA, 101 bp, synthetic construct
  misc_feature 1..101: note = Synthetic
  source 1..101: mol_type = other DNA
ttggcagtcctctcagcataacactcaatgcggtccgtatttattttgctgccgaccacaacccaagctcctccacgaagctctccagccataggaatgta

SEQ ID NO: 876 - DNA, 101 bp, synthetic construct
  misc_feature 1..101: note = Synthetic
  source 1..101: mol_type = other DNA
ttggcagtcctctcagcataacactcaatgcggtccgtatttattttgcttccgaccacaacccaagctcctccacgaagctctccagccataggaatgta

SEQ ID NO: 877 - DNA, 101 bp, synthetic construct
  misc_feature 1..101: note = Synthetic
  source 1..101: mol_type = other DNA
ttggcagtcctctcagcataacactcaatgcggtccgtatttattttgctcccgaccacaacccaagctcctccacgaagctctccagccataggaatgta

SEQ ID NO: 878 - DNA, 202 bp, synthetic construct
  misc_feature 1..202: note = Synthetic
  source 1..202: mol_type = other DNA
tctgacctgaacttgatttcaattaacccttgaggttcgagaacattacctttggcagtcctctcagcataacactcaatgcggtctggatttattttgctaccgaccacaacccaagctcctccacgaagctctccagccataggaatgtagacaaacgcaggctgattatatgtcctaaggttctcgacaattgttgacc

SEQ ID NO: 879 - DNA, 202 bp, synthetic construct
  misc_feature 1..202: note = Synthetic
  source 1..202: mol_type = other DNA
tctgacctgaacttgatttcaattaacccttgaggttcgagaacattacctttggcagtcctctcagcataacactcaatgcggtctggatttattttgctgccgaccacaacccaagctcctccacgaagctctccagccataggaatgtagacaaacgcaggctgattatatgtcctaaggttctcgacaattgttgacc

SEQ ID NO: 880 - DNA, 202 bp, synthetic construct
  misc_feature 1..202: note = Synthetic
  source 1..202: mol_type = other DNA
tctgacctgaacttgatttcaattaacccttgaggttcgagaacattacctttggcagtcctctcagcataacactcaatgcggtctggatttattttgcttccgaccacaacccaagctcctccacgaagctctccagccataggaatgtagacaaacgcaggctgattatatgtcctaaggttctcgacaattgttgacc

SEQ ID NO: 881 - DNA, 202 bp, synthetic construct
  misc_feature 1..202: note = Synthetic
  source 1..202: mol_type = other DNA
tctgacctgaacttgatttcaattaacccttgaggttcgagaacattacctttggcagtcctctcagcataacactcaatgcggtctggatttattttgctcccgaccacaacccaagctcctccacgaagctctccagccataggaatgtagacaaacgcaggctgattatatgtcctaaggttctcgacaattgttgacc

SEQ ID NO: 882 - DNA, 202 bp, synthetic construct
  misc_feature 1..202: note = Synthetic
  source 1..202: mol_type = other DNA
tctgacctgaacttgatttcaattaacccttgaggttcgagaacattacctttggcagtcctctcagcataacactcaatgcggtcagtatttattttgctatcgaccacaacccaagctcctccacgaagctctccagccataggaatgtagacaaacgcaggctgattatatgtcctaaggttctcgacaattgttgacc

SEQ ID NO: 883 - DNA, 202 bp, synthetic construct
  misc_feature 1..202: note = Synthetic
  source 1..202: mol_type = other DNA
tctgacctgaacttgatttcaattaacccttgaggttcgagaacattacctttggcagtcctctcagcataacactcaatgcggtcggtatttattttgctatcgaccacaacccaagctcctccacgaagctctccagccataggaatgtagacaaacgcaggctgattatatgtcctaaggttctcgacaattgttgacc

SEQ ID NO: 884 - DNA, 202 bp, synthetic construct
  misc_feature 1..202: note = Synthetic
  source 1..202: mol_type = other DNA
tctgacctgaacttgatttcaattaacccttgaggttcgagaacattacctttggcagtcctctcagcataacactcaatgcggtctgtatttattttgctatcgaccacaacccaagctcctccacgaagctctccagccataggaatgtagacaaacgcaggctgattatatgtcctaaggttctcgacaattgttgacc

SEQ ID NO: 885 - DNA, 202 bp, synthetic construct
  misc_feature 1..202: note = Synthetic
  source 1..202: mol_type = other DNA
tctgacctgaacttgatttcaattaacccttgaggttcgagaacattacctttggcagtcctctcagcataacactcaatgcggtccgtatttattttgctatcgaccacaacccaagctcctccacgaagctctccagccataggaatgtagacaaacgcaggctgattatatgtcctaaggttctcgacaattgttgacc

SEQ ID NO: 886 - DNA, 202 bp, synthetic construct
  misc_feature 1..202: note = Synthetic
  source 1..202: mol_type = other DNA
tctgacctgaacttgatttcaattaacccttgaggttcgagaacattacctttggcagtcctctcagcataacactcaatgcggtcagtatttattttgctaccgaccacaacccaagctcctccacgaagctctccagccataggaatgtagacaaacgcaggctgattatatgtcctaaggttctcgacaattgttgacc

SEQ ID NO: 887 - DNA, 202 bp, synthetic construct
  misc_feature 1..202: note = Synthetic
  source 1..202: mol_type = other DNA
tctgacctgaacttgatttcaattaacccttgaggttcgagaacattacctttggcagtcctctcagcataacactcaatgcggtcagtatttattttgctgccgaccacaacccaagctcctccacgaagctctccagccataggaatgtagacaaacgcaggctgattatatgtcctaaggttctcgacaattgttgacc

SEQ ID NO: 888 - DNA, 202 bp, synthetic construct
  misc_feature 1..202: note = Synthetic
  source 1..202: mol_type = other DNA
tctgacctgaacttgatttcaattaacccttgaggttcgagaacattacctttggcagtcctctcagcataacactcaatgcggtcagtatttattttgcttccgaccacaacccaagctcctccacgaagctctccagccataggaatgtagacaaacgcaggctgattatatgtcctaaggttctcgacaattgttgacc

SEQ ID NO: 889 - DNA, 202 bp, synthetic construct
  misc_feature 1..202: note = Synthetic
  source 1..202: mol_type = other DNA
tctgacctgaacttgatttcaattaacccttgaggttcgagaacattacctttggcagtcctctcagcataacactcaatgcggtcagtatttattttgctcccgaccacaacccaagctcctccacgaagctctccagccataggaatgtagacaaacgcaggctgattatatgtcctaaggttctcgacaattgttgacc

SEQ ID NO: 890 - DNA, 202 bp, synthetic construct
  misc_feature 1..202: note = Synthetic
  source 1..202: mol_type = other DNA
tctgacctgaacttgatttcaattaacccttgaggttcgagaacattacctttggcagtcctctcagcataacactcaatgcggtcggtatttattttgctaccgaccacaacccaagctcctccacgaagctctccagccataggaatgtagacaaacgcaggctgattatatgtcctaaggttctcgacaattgttgacc

SEQ ID NO: 891 - DNA, 202 bp, synthetic construct
  misc_feature 1..202: note = Synthetic
  source 1..202: mol_type = other DNA
tctgacctgaacttgatttcaattaacccttgaggttcgagaacattacctttggcagtcctctcagcataacactcaatgcggtcggtatttattttgctgccgaccacaacccaagctcctccacgaagctctccagccataggaatgtagacaaacgcaggctgattatatgtcctaaggttctcgacaattgttgacc

SEQ ID NO: 892 - DNA, 202 bp, synthetic construct
  misc_feature 1..202: note = Synthetic
  source 1..202: mol_type = other DNA
tctgacctgaacttgatttcaattaacccttgaggttcgagaacattacctttggcagtcctctcagcataacactcaatgcggtcggtatttattttgcttccgaccacaacccaagctcctccacgaagctctccagccataggaatgtagacaaacgcaggctgattatatgtcctaaggttctcgacaattgttgacc

SEQ ID NO: 893 - DNA, 202 bp, synthetic construct
  misc_feature 1..202: note = Synthetic
  source 1..202: mol_type = other DNA
tctgacctgaacttgatttcaattaacccttgaggttcgagaacattacctttggcagtcctctcagcataacactcaatgcggtcggtatttattttgctcccgaccacaacccaagctcctccacgaagctctccagccataggaatgtagacaaacgcaggctgattatatgtcctaaggttctcgacaattgttgacc

SEQ ID NO: 894 - DNA, 202 bp, synthetic construct
  misc_feature 1..202: note = Synthetic
  source 1..202: mol_type = other DNA
tctgacctgaacttgatttcaattaacccttgaggttcgagaacattacctttggcagtcctctcagcataacactcaatgcggtctgtatttattttgctaccgaccacaacccaagctcctccacgaagctctccagccataggaatgtagacaaacgcaggctgattatatgtcctaaggttctcgacaattgttgacc

SEQ ID NO: 895 - DNA, 202 bp, synthetic construct
  misc_feature 1..202: note = Synthetic
  source 1..202: mol_type = other DNA
tctgacctgaacttgatttcaattaacccttgaggttcgagaacattacctttggcagtcctctcagcataacactcaatgcggtctgtatttattttgctgccgaccacaacccaagctcctccacgaagctctccagccataggaatgtagacaaacgcaggctgattatatgtcctaaggttctcgacaattgttgacc

SEQ ID NO: 896 - DNA, 202 bp, synthetic construct
  misc_feature 1..202: note = Synthetic
  source 1..202: mol_type = other DNA
tctgacctgaacttgatttcaattaacccttgaggttcgagaacattacctttggcagtcctctcagcataacactcaatgcggtctgtatttattttgcttccgaccacaacccaagctcctccacgaagctctccagccataggaatgtagacaaacgcaggctgattatatgtcctaaggttctcgacaattgttgacc

SEQ ID NO: 897 - DNA, 202 bp, synthetic construct
  misc_feature 1..202: note = Synthetic
  source 1..202: mol_type = other DNA
tctgacctgaacttgatttcaattaacccttgaggttcgagaacattacctttggcagtcctctcagcataacactcaatgcggtctgtatttattttgctcccgaccacaacccaagctcctccacgaagctctccagccataggaatgtagacaaacgcaggctgattatatgtcctaaggttctcgacaattgttgacc

SEQ ID NO: 898 - DNA, 202 bp, synthetic construct
  misc_feature 1..202: note = Synthetic
  source 1..202: mol_type = other DNA
tctgacctgaacttgatttcaattaacccttgaggttcgagaacattacctttggcagtcctctcagcataacactcaatgcggtccgtatttattttgctaccgaccacaacccaagctcctccacgaagctctccagccataggaatgtagacaaacgcaggctgattatatgtcctaaggttctcgacaattgttgacc

SEQ ID NO: 899 - DNA, 202 bp, synthetic construct
  misc_feature 1..202: note = Synthetic
  source 1..202: mol_type = other DNA
tctgacctgaacttgatttcaattaacccttgaggttcgagaacattacctttggcagtcctctcagcataacactcaatgcggtccgtatttattttgctgccgaccacaacccaagctcctccacgaagctctccagccataggaatgtagacaaacgcaggctgattatatgtcctaaggttctcgacaattgttgacc

SEQ ID NO: 900 - DNA, 202 bp, synthetic construct
  misc_feature 1..202: note = Synthetic
  source 1..202: mol_type = other DNA
tctgacctgaacttgatttcaattaacccttgaggttcgagaacattacctttggcagtcctctcagcataacactcaatgcggtccgtatttattttgcttccgaccacaacccaagctcctccacgaagctctccagccataggaatgtagacaaacgcaggctgattatatgtcctaaggttctcgacaattgttgacc

SEQ ID NO: 901 - DNA, 202 bp, synthetic construct
  misc_feature 1..202: note = Synthetic
  source 1..202: mol_type = other DNA
tctgacctgaacttgatttcaattaacccttgaggttcgagaacattacctttggcagtcctctcagcataacactcaatgcggtccgtatttattttgctcccgaccacaacccaagctcctccacgaagctctccagccataggaatgtagacaaacgcaggctgattatatgtcctaaggttctcgacaattgttgacc

SEQ ID NO: 902 - DNA, 101 bp, synthetic construct
  misc_feature 1..101: note = Synthetic
  variation 51: note = n is a, c, g, or t
  variation 66: note = n is a, c, g, or t
  source 1..101: mol_type = other DNA
tacattcctatggctggagagcttcgtggaggagcttgggttgtggtcggnagcaaaataaatacngaccgcattgagtgttatgctgagaggactgccaa

SEQ ID NO: 903 - DNA, 101 bp, synthetic construct
  misc_feature 1..101: note = Synthetic
  variation 36: note = n is a, c, g, or t
  variation 51: note = n is a, c, g, or t
  source 1..101: mol_type = other DNA
ttggcagtcctctcagcataacactcaatgcggtcngtatttattttgctnccgaccacaacccaagctcctccacgaagctctccagccataggaatgta

SEQ ID NO: 904 - DNA, 20 bp, synthetic construct
  misc_feature 1..20: note = Synthetic
  source 1..20: mol_type = other DNA
ggagctacgtggaggggctt

SEQ ID NO: 905 - DNA, 20 bp, synthetic construct
  misc_feature 1..20: note = Synthetic
  source 1..20: mol_type = other DNA
cagagctacgtggaggggct

SEQ ID NO: 906 - DNA, 20 bp, synthetic construct
  misc_feature 1..20: note = Synthetic
  source 1..20: mol_type = other DNA
agagctacgtggaggggctt

SEQ ID NO: 907 - DNA, 101 bp, synthetic construct
  misc_feature 1..101: note = Synthetic
  source 1..101: mol_type = other DNA
tatatccccaaggctgcagagctacgtggaggggcttgggttgtgattggtagcaagataaatacagatcgcattgagttctatgctgagaggactgcaaa

SEQ ID NO: 908 - DNA, 101 bp, synthetic construct
  misc_feature 1..101: note = Synthetic
  source 1..101: mol_type = other DNA
tttgcagtcctctcagcatagaactcaatgcgatctgtatttatcttgctaccaatcacaacccaagcccctccacgtagctctgcagccttggggatata

SEQ ID NO: 909 - DNA, 101 bp, synthetic construct
  misc_feature 1..101: note = Synthetic
  variation 51: note = n is a, c, g, or t
  variation 66: note = n is a, c, g, or t
  source 1..101: mol_type = other DNA
tatatccccaaggctgcagagctacgtggaggggcttgggttgtgattggnagcaagataaatacngatcgcattgagttctatgctgagaggactgcaaa

SEQ ID NO: 910 - DNA, 101 bp, synthetic construct
  misc_feature 1..101: note = Synthetic
  variation 36: note = n is a, c, g, or t
  variation 51: note = n is a, c, g, or t
  source 1..101: mol_type = other DNA
tttgcagtcctctcagcatagaactcaatgcgatcngtatttatcttgctnccaatcacaacccaagcccctccacgtagctctgcagccttggggatata

SEQ ID NO: 911 - DNA, 20 bp, synthetic construct
  misc_feature 1..20: note = Synthetic
  source 1..20: mol_type = other DNA
ggagctacgtggaggggctt

SEQ ID NO: 912 - DNA, 20 bp, synthetic construct
  misc_feature 1..20: note = Synthetic
  source 1..20: mol_type = other DNA
cagagctgcgtggaggggct

SEQ ID NO: 913 - DNA, 20 bp, synthetic construct
  misc_feature 1..20: note = Synthetic
  source 1..20: mol_type = other DNA
agagctgcgtggaggggctt

SEQ ID NO: 914 - DNA, 101 bp, synthetic construct
  misc_feature 1..101: note = Synthetic
  source 1..101: mol_type = other DNA
tatatccccaaggctgcagagctacgtggaggggcttgggtcgtgattggtagcaagataaacacagatcggattgagtgctacgctgagaggaccgcaaa

SEQ ID NO: 915 - DNA, 101 bp, synthetic construct
  misc_feature 1..101: note = Synthetic
  source 1..101: mol_type = other DNA
tttgcggtcctctcagcgtagcactcaatccgatctgtgtttatcttgctaccaatcacgacccaagcccctccacgtagctctgcagccttggggatata

SEQ ID NO: 916 - DNA, 101 bp, synthetic construct
  misc_feature 1..101: note = Synthetic
  source 1..101: mol_type = other DNA
tatatccccaaggctgcagagctacgtggaggggcttgggtcgtgattggtagcaagataaacacagatcgcattgagtgctatgctgagaggactgcaaa

SEQ ID NO: 917 - DNA, 101 bp, synthetic construct
  misc_feature 1..101: note = Synthetic
  source 1..101: mol_type = other DNA
tttgcagtcctctcagcatagcactcaatgcgatctgtgtttatcttgctaccaatcacgacccaagcccctccacgtagctctgcagccttggggatata

SEQ ID NO: 918 - DNA, 101 bp, synthetic construct
  misc_feature 1..101: note = Synthetic
  variation 51: note = n is a, c, g, or t
  variation 66: note = n is a, c, g, or t
  source 1..101: mol_type = other DNA
tatatccccaaggctgcagagctacgtggaggggcttgggtcgtgattggnagcaagataaacacngatcggattgagtgctacgctgagaggaccgcaaa

SEQ ID NO: 919 - DNA, 101 bp, synthetic construct
  misc_feature 1..101: note = Synthetic
  variation 36: note = n is a, c, g, or t
  variation 51: note = n is a, c, g, or t
  source 1..101: mol_type = other DNA
tttgcggtcctctcagcgtagcactcaatccgatcngtgtttatcttgctnccaatcacgacccaagcccctccacgtagctctgcagccttggggatata

SEQ ID NO: 920 - DNA, 101 bp, synthetic construct
  misc_feature 1..101: note = Synthetic
  variation 51: note = n is a, c, g, or t
  variation 66: note = n is a, c, g, or t
  source 1..101: mol_type = other DNA
tatatccccaaggctgcagagctacgtggaggggcttgggtcgtgattggnagcaagataaacacngatcgcattgagtgctatgctgagaggactgcaaa

SEQ ID NO: 921 - DNA, 101 bp, synthetic construct
  misc_feature 1..101: note = Synthetic
  variation 36: note = n is a, c, g, or t
  variation 51: note = n is a, c, g, or t
  source 1..101: mol_type = other DNA
tttgcagtcctctcagcatagcactcaatgcgatcngtgtttatcttgctnccaatcacgacccaagcccctccacgtagctctgcagccttggggatata

SEQ ID NO: 922 - DNA, 20 bp, synthetic construct
  misc_feature 1..20: note = Synthetic
  source 1..20: mol_type = other DNA
ggagctgcgtggaggggctt

SEQ ID NO: 923 - DNA, 20 bp, synthetic construct
  misc_feature 1..20: note = Synthetic
  source 1..20: mol_type = other DNA
cagagctacgtggaggggct

SEQ ID NO: 924 - DNA, 20 bp, synthetic construct
  misc_feature 1..20: note = Synthetic
  source 1..20: mol_type = other DNA
agagctacgtggaggggctt

SEQ ID NO: 925 - DNA, 101 bp, synthetic construct
  misc_feature 1..101: note = Synthetic
  source 1..101: mol_type = other DNA
tatatccccaaggctgcagagctgcgtggaggggcttgggtcgtgattggtagcaagataaatacagatcgcattgagtgctatgctgagacgactgcaaa

SEQ ID NO: 926 - DNA, 101 bp, synthetic construct
  misc_feature 1..101: note = Synthetic
  source 1..101: mol_type = other DNA
tttgcagtcgtctcagcatagcactcaatgcgatctgtatttatcttgctaccaatcacgacccaagcccctccacgcagctctgcagccttggggatata

SEQ ID NO: 927 - DNA, 101 bp, synthetic construct
  misc_feature 1..101: note = Synthetic
  variation 51: note = n is a, c, g, or t
  variation 66: note = n is a, c, g, or t
  source 1..101: mol_type = other DNA
tatatccccaaggctgcagagctgcgtggaggggcttgggtcgtgattggnagcaagataaatacngatcgcattgagtgctatgctgagacgactgcaaa

SEQ ID NO: 928 - DNA, 101 bp, synthetic construct
  misc_feature 1..101: note = Synthetic
  variation 36: note = n is a, c, g, or t
  variation 51: note = n is a, c, g, or t
  source 1..101: mol_type = other DNA
tttgcagtcgtctcagcatagcactcaatgcgatcngtatttatcttgctnccaatcacgacccaagcccctccacgcagctctgcagccttggggatata

SEQ ID NO: 929 - DNA, 20 bp, synthetic construct
  misc_feature 1..20: note = Synthetic
  source 1..20: mol_type = other DNA
ggagctgcgtggaggagctt

SEQ ID NO: 930 - DNA, 20 bp, synthetic construct
  misc_feature 1..20: note = Synthetic
  source 1..20: mol_type = other DNA
agagctgcgtggaggagctt

SEQ ID NO: 931 - DNA, 20 bp, synthetic construct
  misc_feature 1..20: note = Synthetic
  source 1..20: mol_type = other DNA
gagagctgcgtggaggagct

SEQ ID NO: 932 - DNA, 101 bp, synthetic construct
  misc_feature 1..101: note = Synthetic
  source 1..101: mol_type = other DNA
tacattcctatggctggagagctgcgtggaggagcttgggttgtggttggtagcaaaataaatacagaccgaattgagtgttatgctgagaggactgctaa

SEQ ID NO: 933 - DNA, 101 bp, synthetic construct
  misc_feature 1..101: note = Synthetic
  source 1..101: mol_type = other DNA
ttagcagtcctctcagcataacactcaattcggtctgtatttattttgctaccaaccacaacccaagctcctccacgcagctctccagccataggaatgta

SEQ ID NO: 934 - DNA, 101 bp, synthetic construct
  misc_feature 1..101: note = Synthetic
  variation 51: note = n is a, c, g, or t
  variation 66: note = n is a, c, g, or t
  source 1..101: mol_type = other DNA
tacattcctatggctggagagctgcgtggaggagcttgggttgtggttggnagcaaaataaatacngaccgaattgagtgttatgctgagaggactgctaa

SEQ ID NO: 935 - DNA, 101 bp, synthetic construct
  misc_feature 1..101: note = Synthetic
  variation 36: note = n is a, c, g, or t
  variation 51: note = n is a, c, g, or t
  source 1..101: mol_type = other DNA
ttagcagtcctctcagcataacactcaattcggtcngtatttattttgctnccaaccacaacccaagctcctccacgcagctctccagccataggaatgta

SEQ ID NO: 936 - DNA, 20 bp, synthetic construct
  misc_feature 1..20: note = Synthetic
  source 1..20: mol_type = other DNA
ggagctacgtggtggagctt

SEQ ID NO: 937 - DNA, 20 bp, synthetic construct
  misc_feature 1..20: note = Synthetic
  source 1..20: mol_type = other DNA
gagagctacgtggtggagct

SEQ ID NO: 938 - DNA, 20 bp, synthetic construct
  misc_feature 1..20: note = Synthetic
  source 1..20: mol_type = other DNA
agagctacgtggtggagctt

SEQ ID NO: 939 - DNA, 101 bp, synthetic construct
  misc_feature 1..101: note = Synthetic
  source 1..101: mol_type = other DNA
tacattcctatggctggagagctacgtggtggagcttgggttgttgttggtagcaaaataaatacagaccgaattgagtgttatgctgagaggactgcgaa

SEQ ID NO: 940 - DNA, 101 bp, synthetic construct
  misc_feature 1..101: note = Synthetic
  source 1..101: mol_type = other DNA
ttcgcagtcctctcagcataacactcaattcggtctgtatttattttgctaccaacaacaacccaagctccaccacgtagctctccagccataggaatgta

SEQ ID NO: 941 - DNA, 101 bp, synthetic construct
  misc_feature 1..101: note = Synthetic
  variation 51: note = n is a, c, g, or t
  variation 66: note = n is a, c, g, or t
  source 1..101: mol_type = other DNA
tacattcctatggctggagagctacgtggtggagcttgggttgttgttggnagcaaaataaatacngaccgaattgagtgttatgctgagaggactgcgaa

SEQ ID NO: 942 - DNA, 101 bp, synthetic construct
  misc_feature 1..101: note = Synthetic
  variation 36: note = n is a, c, g, or t
  variation 51: note = n is a, c, g, or t
  source 1..101: mol_type = other DNA
ttcgcagtcctctcagcataacactcaattcggtcngtatttattttgctnccaacaacaacccaagctccaccacgtagctctccagccataggaatgta

SEQ ID NO: 943 - DNA, 20 bp, synthetic construct
  misc_feature 1..20: note = Synthetic
  source 1..20: mol_type = other DNA
ggagctacgtggaggtgctt

SEQ ID NO: 944 - DNA, 20 bp, synthetic construct
  misc_feature 1..20: note = Synthetic
  source 1..20: mol_type = other DNA
agagctacgtggaggtgctt

SEQ ID NO: 945 - DNA, 20 bp, synthetic construct
  misc_feature 1..20: note = Synthetic
  source 1..20: mol_type = other DNA
cagagctacgtggaggtgct

SEQ ID NO: 946 - DNA, 101 bp, synthetic construct
  misc_feature 1..101: note = Synthetic
  source 1..101: mol_type = other DNA
tatatccccaaggctgcagagctacgtggaggtgcttgggtcgtgattggtagcaagataaatacagatcgcattgagtgctatgctgagacaactgcaaa

SEQ ID NO: 947 - DNA, 101 bp, synthetic construct
  misc_feature 1..101: note = Synthetic
  source 1..101: mol_type = other DNA
tttgcagttgtctcagcatagcactcaatgcgatctgtatttatcttgctaccaatcacgacccaagcacctccacgtagctctgcagccttggggatata

SEQ ID NO: 948 - DNA, 101 bp, synthetic construct
  misc_feature 1..101: note = Synthetic
  variation 51: note = n is a, c, g, or t
  variation 66: note = n is a, c, g, or t
  source 1..101: mol_type = other DNA
tatatccccaaggctgcagagctacgtggaggtgcttgggtcgtgattggnagcaagataaatacngatcgcattgagtgctatgctgagacaactgcaaa

SEQ ID NO: 949 - DNA, 101 bp, synthetic construct
  misc_feature 1..101: note = Synthetic
  variation 36: note = n is a, c, g, or t
  variation 51: note = n is a, c, g, or t
  source 1..101: mol_type = other DNA
tttgcagttgtctcagcatagcactcaatgcgatcngtatttatcttgctnccaatcacgacccaagcacctccacgtagctctgcagccttggggatata

SEQ ID NO: 950 - DNA, 18959 bp, Zea mays
  source 1..18959: mol_type = genomic DNA
atgtcgcagcttggattagctgcaactgcctcgaaggccttgccactactccctaatcgccagagaagtccagctgggactacatttccatcatctgcattgccgaggccctcaaaccgaaggaaaagccatactcgttcacttcgtgatggtggaaatgaggtatcagatgccaaaaagcacagccagtcagttcgtcaaggtactgtcaatatcttacgttacaagctaaatttttgcttcaaaataatatatggagttctttcttggctcatattgtttatttgttttaacattgtaatgtttgaagcctcattctaggtatcaatgtggatgtgctcactactcagtttcaaatgtttgtctgcatgtaggtcttgctggcattatcgacatcccaagtgacgcagtttcggaagtcgatatttcacagtaagcactgtaatattgtgtattatatgtttgttttggagaaagaaaattttctgcagcttatttatactagtttccctaataatgaaatgctgtcttagttttcctagtgctctatacacaatctttcacagtaaatgctgcaaaatatgtgatgtaactgttgcaacacagccaagaacctgcttctgtacctgctatttagagcataatgatactttgctcacttatatgatgtggttataactcatgtggaagaattagtagcagtattgctgtacaatggtcacttattatggaaccatgtctgcatacaaattttctgacttctgttgctacaaatgcctaagttcttttttaaaaaaaattaaatgcttgacctaaattggacatatatgatagatgcaaagctcatttggactttgttgatttatgacaatcatacatattgttagtgttgtgaacacaatggtaatcctttccttttgcctttttccagtggacctaaggatcctagggggccaacagattcctatcaaatgaatgggattatcaatgaaacacataatggaagacatgcctcagggtccatggttgttgaattttgtgcagcactaggtggcaaaacaccaattcacagtatattagtggccaacaatggaatggcggcaacaaagttcatgaggagtgtccgtacatgggctaatgatacttttggatctgagaaggcaattcatctcatagctatggcaactccggaagacatgaggataaatgcagaacacatcagacttgctgatcaattcgtagaggtgcctggtggaacaaacaataataactatgccaacgttcaactcatagtggaggttagcactactaatctgttagtttactattgatcgcctctttcctttatttcttctataatcattggcatatttagctagggggtgtttgagattgctctaggttccagcttcagtgtaaagctgtagtttataatttaaatttattttttttaaatattttaatctaaataataaacaaaataacttatctaaatgtcttctaaaggttcacaacttcaacttcatgattttctaaagctcctaatgacttgcttcaccaacttttccaaatttttaaagctgaagcagtcccaaacagggccttaagtagagaagcttatatttgtcctttgctattgtggaagtccaattgttaccattaactacgaaatattgcagatagcagaaagagtaggtgtttctgctgtttggcctggttggggtcatgcttctgagaatcctgagctgccggatgcattgaccgcaaaaggaatcgtttttcttgggccaccagcaacatcaatgaatgcattgggagataaggttggttcagctctcattgctcaagcagccggggtcccaactcttgcttggagtggatcgcatgtgagtctcactctctttcattactatctgctagtctcgttgctctatctttcatattctaatgacactacatttaggttgaagttccattagagtgctgcttagacgcgatacctgaggagatgtatagaaaagcttgtgttactaccacagaggaggcagttgcaagttgtcaagtggttggttatcctgccatgattaaggcatcctggggaggtggtggtaaaggaataagaaaggtgaactctctgtgaactgtgcacattatggagtttggtgtggggagctaactttccctttttgatatgattaaaatcaattcccctggtaggttcataatgatgatgaggttagagcgctgtttaagcaagtacaaggtgaagtccctggctccccaatatttatcatgaggcttgcatcccaggttagttttttttctttctttctggaatttataatccatccctttttgttcttttaaagttatccttgtattttctggaacatctgatacgctattgaaaaatgcactaatgatcatcatgtttggagattaacatatttatgaaatattaattgatgggagttcttgaaacagatacggttgagccgatatcgttctatttttataatttagaaatcactgtttttgaaaagttacattttcaggagccagactaagagtcagtttggcagagctcacagagcagcttctaggttgaatccaggagaagttttgccaaactgttttttactgagaactgattctttttctgaaatgaactaggaggctgggagctgaaaggagtagcttctcctgattcactccacacatagaatcagactcagagaaatcaatgtcagtcagagaatcacttcacagtgaatcagcttccacagagaatctgtaggagctctgccaaactatccctaagcttttctaagcattgagtggcatgttatacatggaccatttgtgtcaatttacagtcggaatcatggaaaggttgcgataatggatggatagaaacaacacagcttgtttctcaacacttgtgtggagaagatttttaccctttttctaaaattagggggcgtttggtagagctcccacaactccgctcccagcgagaatcactcttgccgagccaaacgataaaaaactgaactacttcatgttgggagtggagtgaatctagtctctactttgtactagaaagtgggagtcaaaaaaatctgcttcccaccactcccaatctgctccccactctttaacccctcaggaatcacttcacagcctatttgtcaaacaattttcgtcaaatagattcacttccagtagagaatcactcaaaatcactctattagaaaatcagctctcggagctagagaatcatggcgcagatctctaccaaacgagcccttactttttggactaaattgtataggtttcaatattctcactattattgaactgtgctgtatcaaacagccaagacatgtttcattctttacacctttattttgaagatggaagcctgaaaattgtgctctgttatctgtagttgtacattatattttattttaaatcttattctctattgtagagtcggcatcttgaagttcagttgctttgtgatcaatatggcaatgtagcagcacttcacagtcgtgattgcagtgtacaacggcgacaccagaaggtctgcccccacccacccagccataaacacccaattgtaaaaccatgcattttattatgtgttctatttcctcaattttagttccattcacatttttctacaacagattattgaagaaggcccagttactgttgctcctcgtgaaacagttaaagcacttgagcaggcagcaaggaggcttgctaaggctgtgggttatgttggtgcggctactgttgagtatctttacagcatggagactggagaatactattttctggagcttaatccccgactacaggtttgctacttgaacatcattgactaataaacctgctgcggaatccttcaaaattttaaattatctccatgcaggttgagcatccagtcactgagtggatagctgaagtaaatctgcctgcagctcaagttgcagttggaatgggcatacctctttggcagattccaggtaattatcaatttaccaacttattctatgttgtctcagcatatgttggtgcagcatagcttgctcccaagtctaggtacaaggaggagggttgcgttaggcgtggcgagccagctataaaaacttagccactcaaaatggaggtgaaacccaatagaaaaccgttggagcgtaaccctcttagtgacacgccatatcggaaaccggtatggtgttaaatgggcaagggcggggacgccacccccttggtggcgcgtcgtgtcgtgatctggatgctgtgtcaagtgagcaaggatcgggtcgtcgtttccttagtggcacgctacatcagcgcccgagtgtagtgacaaatgtgcaagggtcttcgcatctgtctcaatgggtgcgaggggtaaggaagctagttgagtcgactaggatccgtgttggtagttggaacgtagggtcccttacatggtttttaaagcggtaaggcggtccaaggcgttggagcaccgcctggacgcctaggcggcgcctaggcgaggtaggcgggcaaggcgcctaggcgttagaccaccgcccggacgccttaagaacagaggtcccttacaagtaagctaagagagttagtcgatggagcgagcaggaggggtgttagtatcctatgtgtccaggagacaaaatggaaggggcaaaaagcgaaggaggtggagaacaccagtttcaaactttggtactcaggaacagtgtcaaacaaaaatggagtaggtatcctgattgataagaccctcaaggatggagtggtggacgtcaaaatacagggagataggattatcctagtcaaactagttttgggggatgtagtcttgaacattataagtgcatatgcccctcaggttggtctcagcgagagcgagaagaagttctgggaagacttagatggcatgattagagcagtacccaccaatgagaagcttttcataggagatctcaatgttcatgcaggttcaacaaatgcagtttatgagctggctcatggaggtttcgggtatggtagtaggaatcaaggagaggatattttggactttgctatagcctacaacctagtgatagccaacactttcttcagaaagagagattctcatttggtgacttttagcagtggccatcgttcgagccagatcgacttcgtgctcactaggagagaagataaacaagcttgtttgtattgtaaggtgatacctggagagagtgttgtgccccaacataatcttgtggtggctgactttcgttttcggatcagtacccatagggataaacaagcaaaaattgcgaggacgaagtggtggaaactcaaaggggagacatccgaagtttttagggaaagagtttttgtggagggcgcttggtccgaagaagaagatgcaaacatgtgggtgaagatggcaacttgtattaggaaggtggcgtcagaggcgtttggagtgaccaaagggagtagcggtgaacctaaggatacttggtggtggaccgaggatgttcaaaaggcagcttactggatgaggaaagagtgatcacatctcatgagcaaaaacaagaggtgctgcataatttctactctaatttgttggggtatgcccccccagaggaggttaactctgaggttagaagagtgtcacagagctccaatagatttatctgctcttgagcttccctttacagaagaagaagtttgggatgctattgccagtcttccttcagataaagcgcctgggccagatggatacacagggagattctacaaaacttgttggcctatacttaaggcagatttgatggctgcccttgctgcccttcaccttgggaattctcagaatttggggcctctaaacacagcatatattactttgatccctaagaaggcagaagtcatgtctgctggtgattacaggcccatcagcctcattcacagctttgcaaaactttccacaaaggtccttgctaataggcttgctcctcttctcaacaagatggtagaggctaaccaaagtgcttttgttagaggcagatccatacatgacaattatatgttggttcaacactcaattaagtccctacacaggaaaaaagtggccagcctttttctgaaattagatttaacaaaggcatttgattctgtttcctgggctttccttcttgaggtgttgacccaccttggctttggtaataagtggaggaatctttatctccaaccttctggccacttcatcaactcaaattttattaaatgggtttccaggggaacaaatcagacatcgcagaggtttgaggcaaggggaccccctctccccaatgctctttgtcctggtgatggatgtcctcagtagccttttcaaagtggcagaagaaaaagtattgttgtctagtctggaaagtgccattgtgaagtccagattatctctatatgcagatgatgtagtcctgtttgtcaagaccagggaggaagaactaaactgtgtcaaactcattcttgactgttttggtgaagcttctggcctagtagctaatttgcacaagagttgtgccatcccaataagatgtgaagaggaattgctgcatgaagggtgtaacattctgcaatgcaccccttcttccttcccttgcacttacttggggttgcctatctcagataagaagcttagcaggaatattttgatgaattgggttgacaagattgcggataggctaccaaattggaaagctaggctcctcaaccttgctggaaggacagcccttgtgcactttgtactttcagccatcctagtttatcttttccttgctatgaatgtccctaagtgggtgattaacaaaattgataaaatcagaaaaggatttgtgtggagagggagaaaagaggttaatggaggcagctgccttgtggcctgggattcagtcacaagacctttgaagtatggcgggcttgggattcctaatttacaacacatgtgttgggccctccaaaccaaatggttatggcttcaaaaaacagatcagagcagatcttggcatggcttgactatacccattcagcaacatgttaaagatctttttgcagcatctctgatttcctatgtgggaaatggctctaataccttattctggacagataagtggctaaatggatgctccatcagagatcttgctccagaagtggcgtccaaggtgtctaaacgagctcttacctcattgacagtgagtcaggctcttgtaaacaggcaatggatagcacatattaaaacccccctttccttgattggaattcaacaatttcttctcttatgggatactttaggggacgtgcagctttctcaggaggaagaccgccatgtttggaggcacgaggcatcagggctgttctcttctaaatcctgctacaaagtccttctcttcggttctactgtttttgagccttggaagagattatggaagacctgggctcctcctaaatgcaagttcttcctttggttggcaataaggaacaaatgttggacagccgatagattacagttgaggggaatgccacacccagatgtttgcccaatgtgtgatcaagcccaagagacaattcagcacctccttagtgcgtgcatttttgcccgacaattttggcacacaattcttgctgctattggcttggggcacctcactccaacagctgatgaggagaattttgcagactggtggggaaaggcaagccttagggttgtcaagaccagaaaaaggggcttaactctatgatcatcctgggggcttggtgtctatggcttcagagaaacagagcagtgttccatggggagtcttcctcattacccaggattttcaggtgtttctcggatgagtacgtttgctgggtaatagcaggagctaaggagtttgggagcttgggcttagttgctgccctgggcgaggtcgggtcaagtttcagcaacaatctgtaatcaccttcgggtttataagggtttttgggagagttgctcagcaaaatctcctttattgtaatgttttcttttcctctctaatatataagatgcgcagttctcctgcgcgttctataaaaaaaggcaataaaggagaagaaagaatattacaggagcttattccatgacaagagcgcggtcaacatagaaaggtacaaggcaaagaagaccgcaaagcgagttgagtgaggcaaatggttgagcctattattgtcaaaaccgaagactaagtacaaaggaaggggagaaagatgtctataagatagctaggattcgggaaaggaagacgagagacctcaaccaagttaaatgcattaaggatgagatggatcaactcttggtgaaaggacaagacatcaaacagaggtggcagaggtattttgacattcttttcaatggtgagaatgagactatggacacccaattggatgactcctttgatgatttaaatagatgctttgtacgtaggatccaagaatcagaggtcaaagaagctttaaagaggatgaaagggggtagggcccggatggtatcccaatagaggtgtggaaatgccttgtggatattgctatcgtttgactaaccaagttgttcaaccatatttttcgatcaaacaagatgcctgaaaagtggaggaggagtacattagtaccaatcttcaagaacaagggagatattcaaagttgtaccaactattgtgggattaagctcatgagccacactatgaagctatgagagagagttattgagcatcgcctgagaggaatgacacatatgaccatgaaccaatttggattcatgcctagaaggtcaaccatgaagtaattttcttaataaggcaggtcatggagcgatataaggagcagaaggacttgcacatggtttttactaccctagagtcaaaaggtttttattgcacatggttttcttgtcgcatgagatgtgactttggtactacaattagtgaggatggagatgtaagcttgggaggccaggtagtaccaaagaaggacaccttccgttatttgggatcgatgctacagagagatggtgatattgatgaagatgttagccatagaatcaaagcggggtggatgaaatgacgtcaagcatcgggagtcctatgcgacaagagtgtggcacagaagttgaaaggcaagttctacaggacaacgattaggcctgctatgttatatggggctgagtgttggcctactaagagacgacatatccaacaactaagtgtcgtagagatacgtatcttgtgttggatatgtgggcacacaagattggatcgagtgagaaatgatgacatacgcgatcggctaggagtagcgccaattgaagataagattattcaacaccggttgagatggtttgagcatgtccaatgaagaccccagtggcaccggtgcatagaggcatcataagacaagacaataacgtgaagagaggtagaggtcgaccaaacttgacatgggaggaggcaatcaaaagggacttgaaggaatggaatatcctaatggagttgtgtttggatagatcatagaagtgcttggaaagaagctatccacgtgcccgaaccgtgattaggcctttttccttttagtgctctcaaaagcttttgccctcctctttctttttctctttctctttttggtgacatcttgttgggtttcaactctagcctacctcaacttgcttgggattaaaaggctatgttgatgttgatgattcagttccttattattttattccctaagctgtcgtctacttatgtagaaatcagacgtttttatggaatggactatggaggagggtatgacatttggaggaaaacagcagctcttgctgcaccatttaattttgatgaagtagattctctatggccaaagggccattgtgtagcagttagaattactagtgaggacccagatgatggtttcaaacctactggcgggaaagtgaaggtaaggtttcaagatgacagatgttctatatacagttcaaagtttcaaacaaatttatgttgggaaatttggattcataccattaaaagatcaccactttggatccataccattactatctcacttacatgtgggtccacatgagtcaatgacatgtggggtccatggtatatatctaaagtttggatcttttaatggtatagatccaattgttccatttatgtttggttacatgaccaggtcttggtttttatattttaggagataagttttaaaagcaagcctaatgtttgggcctacttctcagtaaaggtaacttgttaactttgttacactgtcacattattcttcattgtgcagataatttggatgggactctttctattttaaccattcatcatctcatttagcgaagcaaatatttgcactgactccccttttatctgctttcagtctggtggaggcattcatgaatttgctgattctcagtttggtatgtttaaatcaagaatattcttctttgtaatatgtatttgtcctcatttttgaaatattgctctttccattacaggacatgtttttgcatatggactctctagaccagcagctataacaaacatgtctcttgcattaaaagagattcagattcgtggagaaattcattcaaatgttgattacacagttgacctcttaaacgtaagaaatattgaccatcttttgaatccccattttgactatgttgatttgtctcatgtttgattttccattatggctaaacctgtggtgctgtttccttattattccaggcttcagacttcagagaaaacaagatccacactggttggctggatacaagaatagctatgcgtgttcaagctgagaggcccccatggtatatctcagtggttggaggtgctttatatgtaagataaagaaatcataccatgctaacatcttttgtcaagctactgtgaagatcattaagatctaatttaaatcgtcgttacatgctacagaaaacagtaaccaccaatgcagccactgtttctgaatatgttagttatctcaccaaaggccagattccaccaaaggtatgttttgtggaattaactctgtatacttttaaggtgaaaaatggttgacaaataattcttatatgcagcatatatcccttgtcaattcaacagttaatttgaatatagaagggagcaaatacacagtaagtttgacattgcataagagaatttattttagttgttacaataaagttagatagacatcattctgagtttcgaatgtgttgtattgtagattgaaactgtcaggactgggcatggtaggtacaagttgcgaatgaatgattcaacagttgaggcgaatgtacaatctttatgtgatggtggcctcttaatgcaggtaacttattattttttttatactttattattaattagttggataaatggttttgatttcatgatggttctgattgttgaactgcaatgactccagttggatggaaacagccatgtgatttatgcagaagaagaagctggcggtacacggcttcagattaatggaaagacatgcttgttgcaggtaaatactctcttctttttttttatgttcttggtatcaattgggcaacttccgccagacttttctgtatcatttattattgcatttccctccactaccttacctttaaaaggtgggttctgttgtttgcttctgcaggagacatcacctaagaaaattgtgactcatccttgttttcttgcagaatgaccatgatccatcaaagttattagctgagactccctgcaaacttcttcgctttttggttgctgatggtgctcatgttggtgcggatgtgccatatgcggaagttgaggttatgaagatgtgcatgcctctcttgtcacctgcttctggtgtcattcattgtatgatgtctgagggccaggcgttgcaggttatattcatacatgtccattccttgcattgttgctttcatcacatagtatttcatgtaaaatttaccaacttatattttgttttaggctggtgatcttatagcaaggctggatcttgatgacccttctgctgtgaaaagagctgaaccatttgatggaatgtttccactaatggacctccctgttgctgcctctagtcaagtacacaaaagatatgctgcaagtttgaatgctgctcgaatggtccttgcaggatatgagcacaatatcaatgaagtaaacattccatcttattatgaccacattccttttattttctttctttatcttgtgtttcctttacttatgatttaaaatatgttttttgcatgtttatgagttatgggttagatgggtgccattttttttgtgttcggtttacttttggttccaacttcaaatgttctataatagtatatgctgatcatgctcatgttagtgcagaactgcaagtttgtctgctacataaattgttttctttctttctttcataattttatcttctagtttgacaatttccaatcacacttctttgatttgaagttattgcactttcgtgtctatctaattaacttctggttccaaatgttctacaatagtgtatgctgatcatgctcatgttagtgtggaactgcaagtttatttgctacataaattgttttctttctttctttcagaactttatcttctagtttgacaatttctaatcacactttgttgcacattggtgtctatcccattaactccttagcacttaattatccattatcaattgattcatgttaaattcttctttgtttcaggtcgttcaagatttggtatgctgcctggacaatcctgagcttccttttctacagtgggatgaactaatgtctgttctagcaacgaggcttccaagaaatctcaagagtgaggtatgagacagttggcaagatatagccaatctggattgaaggaaagatgattcattttagtagatgacaaaaagccattagagaaactataatagtttataacattagtttgcatagtgttatgttcataaaccctgtagtttgctgctgtttgttttgtaaaatctgaaattgtattgattgttatattaaaaactcagaatatttcactctagcattttaccagaaggtgaatctttcagcaagtttgccttaattctaggaacaattggatctataccattaaaagatccaaactttagatatataccatggaccccacatgtcattgactcatgtggacccacatgtaagtgagatagtaatggtatggatccaaagtggtgatcttttaatggtatggatccaaatttcccttaattctatgattctagttcttctggtatgtcctttttattgtagctctgatgtttttatcttttatgcatgcagttagaggataaatacaaggaatacaagttgaatttttaccatgggaaaaacaaggacttcccatccaagttgctaagagacatcgtcgaggtaagttatgtttcttctatggtatcccttgaactgtttgctgttgtcttatctagtgttttctctgtaggaaaatcttgcatatggttcagagaaggaaaaggctacaaatgagcgacttgttgagcctcttatgaacctactgaagtcatatgagggtgggagagaaagccatgcacattttgttgtcaagtctctttttgaggagtatcttaccgtggaagaacttttcagtgatggcattcaggttgttgtacatgacaagactgaccagatcagtattagaaaaaagaacacaaaatgttcactccttttcattctcttagttaggagaaattttttgcatggcttcagctggaatttactcatacaatctgacttgttttttttctaattatgtcatggcagtctgacgtgattgaaaccttgcgtcatcagcacagtaaagacctgcagaaggttgtagacatcgtgctgtctcaccaggtaaatttctgtatggctgatgatttttatgcaaatgaaacaatctttgatattggtagtgattttattcacagggtgtgaggaacaaagctaagcttgtaacagcacttatggaaaagctggtttatccaaatcctggtgcgtacagggatctgttggttcgcttttcgtccctcaatcataaaagatattataaggtgcggtgattagaaataacctagatattccccttataaattattttgatattttacctaatgaattccatgcatcttaataaacacagttggcccttaaagcaagtgaacttcttgaacaaaccaaactaagtgaactctgttccagcattgcaagaagcctttcagatctggggatgcataagggagaaatgactattaaggatagcatggaagatttagtctctgccccattgcctgttgaagatgctcttatttctttgtttgattacagtgatccaactgttcagcagaaagtgattgtgacatacatatcacgattgtaccaggtatcatatcaactaacttgatgtctttcataatcctactgagcagtctgacatgttagatgtcctaatgacatggaatgctcatcttttcattatacacatgaaatgttgagaaatgaaatgataatcgactgaaattaactgagtgtgaaaaattgtgatctcccaacttgttaacgaacatcgtcctggctaacttgccaatattttttcagcctcatcttgtgaaggatagcatccaaatgaaattcaaagaatctggtgctattgttttttgggaattttctgaagggcatgttgatactagaaatggacaaggggctattcttggtgggaagagatggggtgccatggtcgttctcagatcacttgaatctgcatcaacagccattatggctgcattaaaagattctgtacagtacaacaactctgaggtcaacacaatgcacattgtgttattgaatgctgaaactgaaagtaatataagtgggacaaggtttgttcatgtgcaatattaggtccaaaggtttttttttctaagttgtgtaactctttttaatcgagtccatttctttcagcagtgatgaccaagctcaacataggatggaaaagcttaccaagatactgaaggatagtagtgttgcaagtgatctccaagctgctggtttgaaggttataagttgcattgttcaaagagatgcaggtcgcatgccaatgcgccacacattcctctggtttgatgaaaagaactgttatgaagaagagcatattctccggcatgtggagcctcccctctctgcacttcttgaattggtctgtctatcaaaataactgcatgcttgtttgctacattatgttattatgttttgcttattttcttttctatgcttatttttcttattatgaatacagggtaagttgaaagtgaaaggatacaacgaaatgaagtatactccatcacgtgatcgtcaatggcatatctacacactaagaaatactgaaaaccccaaaatgttgcatagggtatttttccgaactattgtcaggcaacccaatgcaggcaacaagtttacgtcggcacaggtcagcgacactggattaggatgtcctgaagaatctctgtcatttacatcgaatagcatcttaagatcactgatgactgctatagaagaattagagcttcatgcgattaggacaggtcattctcacatgtttttgtgcatactgaaagaacaaaagcttcttgatctcgtcccattttcagggtaagtgtgcacataatccttttcagaatatgtttatgcgttgactattatattggtctcttaataagcatttcgtgttactcaggagtacaattgttgacgttggccaagatgaagctactgcttgttcacttttaagatcaatggctttgaagatacatgaacttgttggtgcaaggatgcatcatctttctgtatgccagtgggaggtgaaactcaagttggactgtgatggacctgcaagtggtacctggagagtcgtaactacaaatgtcactagtcacacctgcaccattgatgtaagttgtccttactgtttttgtattttgtatataacacacatgaagatttaagcaacatgcagttcttatattccgaaatccgaactgccatccatgtcattatgttctgaagcacatagtatttctaatggatttagatctaccgagaagtggaagatacagaatcgcagaagttactataccattcagctacttcgtcagctggtccaatgcatggtgttgcactgaataatccttatcaacctttgagtgtgattgatctaaagcgctgctctgctaggaacaacagaacaacatattgctacgattttccgctggtgagctgcccctcttcctcgctcactcaccctcaccctcaatacctatctttagttatttttaacctaagttggtaattacaaaaaaatgtaggcatttgaaactgcactgcagaagtcatggcaatccaactgttctagtgttcctgaaggcagtgaaaatagtaaatcctacgtgaaatcaactgagctggtgtttgctgaaaaacatgggtcctggggcactcctataattcccatggaacgtcctgctgggctcaatgacattggtatggtcgcttggatcttggaaatgtcaacacctgaatttcccaatggcaggcagattattgttgtagcaaatgatattactttcagagctggatcattcggcccaagggaagatgcattttttgaagctgtcaccaacctggcttgcgaaaggaagcttccccttatatacttggcagcaaactctggtgctaggattggcatagctgatgaagtgaaatcttgcttccgtgttgggtggtctgatgaacgcagccctgaacgagggtttcagtacatctatctgactgaagaagactatgctcgtattagctcttctgttatagcacataagctgcagctagataatggtgaaattaggtggattattgactctgttgtgggcaaggaggatgggcttggtgttgagaacatacatggaagtgctgctattgccagtgcttattctagggcatatgaggagacatttacacttacatttgtgactgggcggactgtaggaataggagcctatcttgctcgacttggtatacggtgcatacagcgccttgaccagcctattattttaacagggttttctgccctgaacaagctccttgggcgagaagtgtacagctcccacatgcagctgggtggtcctaagatcatggcgaccaatggtgttgtccacttgaccgtttcagatgatcttgaaggtgtttccaatatattgaggtggctcagctatgttcctgcaaacattggtggacctcttcctattaccaaacctttggaccctccagatagacctgtcgcatacatccctgagaacacatgcgatccgcgtgcagccatccgtggtgtagatgacagccaagggaaatggttgggtggtatgtttgacaaagacagctttgtggagacatttgaaggatgggcaaaaacagtggttactggcagagcaaagcttggaggaattcctgtgggtgttatagctgtggagacacagaccatgatgcagctcatccctgctgatccaggtcaacttgattcccatgagcgatctgttcctcgggctggacaagtgtggttcccagattctgcaaccaagacagctcaggcattattagacttcaaccgtgaaggattgcctctgttcatcctggctaactggagaggcttttctgggggacagagagatctctttgaaggtattcttcaggctgggtcagcaattgttgagaaccttaggacatataatcagcctgcgtttgtctacattcctatggctggagagcttcgtggaggagcttgggttgtgatcgatagcaaaataaatccagaccgcattgagtgttatgctgagaggactgccaaaggtaatgtgctcgaacctcaagggttaattgaaattaagttcaggtcagaggaactccaagactgtatgggcaggcttgacccagagttgataaatctgaaagcaaaacttcaagatgcaaagcatggaaatggaagtctaccagacatagaatcgcttcagaagagtatagaagcgcgtacaaaacagttgttacctttatatacccagattgcagtacgctttgctgaattgcatgatacttccctgagaatggcagctaaaggcgtgattaagaaagttgtagactgggaagaatcacgctctttcttctataaaaggctacggaggaggatctctgaagatcttcttgcaaaagaaataagacgaataattggtgacaacttcacgcaccaatcggcgatggagcttatcaatgaatggtacctggcttctcaggccacaacaggaagcactgctggatgggatgatgatgatgcttttgttgcctggaaggacagtcctgaaaactacaagggatatatccaagagctaagggctcaaaaagtatctcagtcgctctctgatcttgctgactccagttcagatctacaagcattctcgcagggtctttctacactattagataaggtaagtttgcttacagttttacctttttttaatttacaattaacctgagctacaacttgtggtatctgttgtatctcaccttttttaggagctcgtatttcagttgcattctgctggacacttaattgcatatatacatgacatcttatcaattcatgattctaatacatacccattgccttctcacatcccgtctttggatgctcattcagatggatccttctcagagagtgaagtttgttcaggaagtcaagaaggttcttggatga

SEQ ID NO: 951 - protein, 2326 aa, Zea mays
MSQLGLAATASKALPLLPNRQRSPAGTTFPSSALPRPSNRRKSHTRSLRDGGNEVSDAKKHSQSVRQGLAGIIDIPSDAVSEVDISHGPKDPRGPTDSYQMNGIINETHNGRHASGSMVVEFCAALGGKTPIHSILVANNGMAATKFMRSVRTWANDTFGSEKAIHLIAMATPEDMRINAEHIRLADQFVEVPGGTNNNNYANVQLIVEIAERVGVSAVWPGWGHASENPELPDALTAKGIVFLGPPATSMNALGDKVGSALIAQAAGVPTLAWSGSHVEVPLECCLDAIPEEMYRKACVTTTEEAVASCQVVGYPAMIKASWGGGGKGIRKVHNDDEVRALFKQVQGEVPGSPIFIMRLASQSRHLEVQLLCDQYGNVAALHSRDCSVQRRHQKIIEEGPVTVAPRETVKALEQAARRLAKAVGYVGAATVEYLYSMETGEYYFLELNPRLQVEHPVTEWIAEVNLPAAQVAVGMGIPLWQIPEIRRFYGMDYGGGYDIWRKTAALAAPFNFDEVDSLWPKGHCVAVRITSEDPDDGFKPTGGKVKEISFKSKPNVWAYFSVKSGGGIHEFADSQFGHVFAYGLSRPAAITNMSLALKEIQIRGEIHSNVDYTVDLLNASDFRENKIHTGWLDTRIAMRVQAERPPWYISVVGGALYKTVTTNAATVSEYVSYLTKGQIPPKHISLVNSTVNLNIEGSKYTIETVRTGHGRYKLRMNDSTVEANVQSLCDGGLLMQLDGNSHVIYAEEEAGGTRLQINGKTCLLQNDHDPSKLLAETPCKLLRFLVADGAHVGADVPYAEVEVMKMCMPLLSPASGVIHCMMSEGQALQAGDLIARLDLDDPSAVKRAEPFDGMFPLMDLPVAASSQVHKRYAASLNAARMVLAGYEHNINEVVQDLVCCLDNPELPFLQWDELMSVLATRLPRNLKSELEDKYKEYKLNFYHGKNKDFPSKLLRDIVEENLAYGSEKEKATNERLVEPLMNLLKSYEGGRESHAHFVVKSLFEEYLTVEELFSDGIQSDVIETLRHQHSKDLQKVVDIVLSHQGVRNKAKLVTALMEKLVYPNPGAYRDLLVRFSSLNHKRYYKLALKASELLEQTKLSELCSSIARSLSDLGMHKGEMTIKDSMEDLVSAPLPVEDALISLFDYSDPTVQQKVIVTYISRLYQPHLVKDSIQMKFKESGAIVFWEFSEGHVDTRNGQGAILGGKRWGAMVVLRSLESASTAIMAALKDSVQYNNSEVNTMHIVLLNAETESNISGTSSDDQAQHRMEKLTKILKDSSVASDLQAAGLKVISCIVQRDAGRMPMRHTFLWFDEKNCYEEEHILRHVEPPLSALLELGKLKVKGYNEMKYTPSRDRQWHIYTLRNTENPKMLHRVFFRTIVRQPNAGNKFTSAQVSDTGLGCPEESLSFTSNSILRSLMTAIEELELHAIRTGHSHMFLCILKEQKLLDLVPFSGSTIVDVGQDEATACSLLRSMALKIHELVGARMHHLSVCQWEVKLKLDCDGPASGTWRVVTTNVTSHTCTIDIYREVEDTESQKLLYHSATSSAGPMHGVALNNPYQPLSVIDLKRCSARNNRTTYCYDFPLAFETALQKSWQSNCSSVPEGSENSKSYVKSTELVFAEKHGSWGTPIIPMERPAGLNDIGMVAWILEMSTPEFPNGRQIIVVANDITFRAGSFGPREDAFFEAVTNLACERKLPLIYLAANSGARIGIADEVKSCFRVGWSDERSPERGFQYIYLTEEDYARISSSVIAHKLQLDNGEIRWIIDSVVGKEDGLGVENIHGSAAIASAYSRAYEETFTLTFVTGRTVGIGAYLARLGIRCIQRLDQPIILTGFSALNKLLGREVYSSHMQLGGPKIMATNGVVHLTVSDDLEGVSNILRWLSYVPANIGGPLPITKPLDPPDRPVAYIPENTCDPRAAIRGVDDSQGKWLGGMFDKDSFVETFEGWAKTVVTGRAKLGGIPVGVIAVETQTMMQLIPADPGQLDSHERSVPRAGQVWFPDSATKTAQALLDFNREGLPLFILANWRGFSGGQRDLFEGILQAGSAIVENLRTYNQPAFVYIPMAGELRGGAWVVIDSKINPDRIECYAERTAKGNVLEPQGLIEIKFRSEELQDCMGRLDPELINLKAKLQDAKHGNGSLPDIESLQKSIEARTKQLLPLYTQIAVRFAELHDTSLRMAAKGVIKKVVDWEESRSFFYKRLRRRISEDLLAKEIRRIIGDNFTHQSAMELINEWYLASQATTGSTAGWDDDDAFVAWKDSPENYKGYIQELRAQKVSQSLSDLADSSSDLQAFSQGLSTLLDKMDPSQRVKFVQEVKKVLG

SEQ ID NO: 952 - DNA, 13219 bp, Sorghum bicolor
  source 1..13219: mol_type = genomic DNA
atgtcgcagcttggattagctgcagctgcctcaaaggcactgccactactccctaatcgccagcgaagtcctgctgggactacattctcatcatctgcattgtcgaggccctcaaaccgaaggaaaagccgtacccgttcactccgtgatggtggagatggggtatcagatgtcaaaaagcacagccagtctgttcgtcaaggtactgtgaatatctttcgatacaagctaaaattttgtttcaaaatatatatggagttctttattggctggcattgttcatttgttttaacatcgtaatgtttgatgcctcattctaggtatcaacgtagatatgctcactgctcagtttcaaatgtttgtctgcatgtaggtcttgctggcattattgacctcccaagcgaggcagcttcggaagtggacatttcacagtaagcggctatagtattttgcgtattatatgtttgttttggaaaaagaaaatattctgcagcttatttatactagtttccctgatagtgaaatgctgtcttaatgtcctagtgctgtatactcaatatttcgtagtaaatgctgcaaaatatgtgatataaatgttgcaacacagccaggggcctgcttctgtacctgctattgagcatgatgaatacttcgctcacttatatgatgtggttatatctcatgtagaagaattagttgcagtattgctggacaatggttacttattatgaaatcatgtctgctacaaattttctggcttctgttgctgtaaatgcctgttttttttttggaaaagattaaatgtttgacctaaattggacatatactccctccgtccctgaatatctgtcgttctcgcttcccgagaaatgacttttattaattttatataaaaacatattaatattttttatacaattgacatcattagataggtctttaatctagttttttaataaatttatttggagatataaatgttgtacgcatttgctacaaatctagtcaaacttgtggcaggaaacccagaaacgacacttaaaaaggggcggagggagtatgatagacgcaaagctcattttgaacttttttgatttgtgacaaccatgcatattgttagtgttgtgaacaaaatggtaatcctttccttttgtatttttccagtggatctgaggatcctaggggtccaccagattcctatcaaatgaatgggattatcaatgaaacacataatggaagacatgcttcagtgtccaaggttgttgaattttgtgcggcactaggtggcaaaacaccaattcacagtatattagtggccaataatggaatggcagcagcaaagttcatgaggagtgtccggacatgggctaatgatacttttggatctgagaaggcaattcagctcatagctatggcaactccggaagacatgaggataaatgcagagcacattagaattgctgatcaatttgtagaggtgcctggtggaacaaacaataataactacgccaacgttcaactcatagtggaggttagcactgctaatctgttagtttactactgatcggctgttccctttatttcttctataaccattgtcatatttaagtagagaagtttatatttctcctctgctgttgttgtggaagtctaattgtcaccatttattaactatgaaatattgcaggtagcagaaagagtaggtgtttctgctgtttggcctggttggggtcatgcttctgagaatcctgaactgccggatgcattgactgcaaaaggaatcgttttccttgggccacctgcatcatcaatgaatgcattgggagataaggtcggttcagctctcattgctcaagcagctggggtcccaactcttgcttggagtggatcacatgtgagtctctctctctctctctctctctctctctctttgattactatctgccggtctcattgctctaactttcatattctaataatgacactaaataggttgaagtgccattagagtgctgcttagacgctatacctgaggagatgtatagaaaagcttgtgttactaccacagaggaagcagttgcaagttgtcaagtgattggttatcctgccatgattaaggcatcctggggaggtggtggtaaaggaataagaaaggtgtgttttatttatgtgactaaactatctgtgaagaactgtgcacattggggagtatggtgtagggagctacccccctctcctgtgatgtgattaaatcaatttccctggcaggttcataatgatgatgaggttagagcactgtttaagcaagtacaaggtgaagtccctggctccccaatatttatcatgaggcttgcagcccaggttagttttttttttctttctgaaatctatattccatccctttttgttcttttaaagttatccttgtattttctggaagcttcatctgatgcattattgacaagtgcactgatgatcatcatatttggagattaacatatttatgaaaggttaattgatgggaactgttgaaagagaatggttgagcggataccattctatttttagaatttagaaatcgcggtttttgcgtacaaaattgcatttccaggaactggactaagcttttcttagtattgagtggcatgttatacatggaccatttttgtcaacttacagggctgtgataatggctggagagaaataatacatcttgtttctcaacacttatgtggagaagatgttttacctttttctaaaatcactttttggattaaattgtataagttttcaatattctcactattattgaaccaaaacatgtttcattctttacacctttatttttcaagatggaagcctggaattgtgctctgttatctatagtcaattagtcatatatttatttgattttaaatctttttctctattgtagagtcggcatcttgaagttcagttgctttgtgatcaatatggcaatgtagcagcacttcacagtcgtgattgcagtgtgcaacggcgacaccagaaggtctgcccccacccactcagccataaacaccaaattatagaaccatgcattttgttatgcgatctatttcttaactgtagttccattcgcatttttctacaacagattattgaagaaggcccagttactgttgctcctcgtgagacagttaaagcacttgagcaggcagcaaggaggcttgctaaggctgtgggttatgttggtgctgctactgttgagtatctttacagcatggaaactggagaatactattttctggagcttaatccccgactacaggtttgctatacgtgaacatcattgactaattaacctgtcggggaatccttcacataaaattatctccatgcaggtcgagcatccagtcaccgaatggatagctgaagtaaatctgcctgcagctcaagttgctgttggaatgggcatacctctttggcaaattccaggtaattaccaatttaccaacttatttagttccttattagtttattctctaatctgtctacttatgtagaaatcagacgtttctatggaatggactatggaggagggtatgatatttggaggaaaacagcagctcttgctacaccatttaattttgatgaagtagattctcaatggccaaagggccattgtgtagcagttagaattactagtgaggaccctgatgatggtttcaaacctactggtgggaaagtgaaggtaagattttgagatgacagatgtattatgtatagttcaaacagattaagtttggttaagtgaccagatcttgattttttatcttttaggagataacttttaaagccaagcctaatgtttgggcctacttctcagtaaaggtaacttgttaactttgttacactgttacattattcttcattgtgcagataatttggatgggactaagtttttaaccattcatcgtctcatttagctaagcaaatgtttgcactgactcccctttttatctgctttcagtctggtggaggcattcatgaatttgctgattctcagtttggtatgtgtaaatcaagaatattcttctttgtaatttgtattggtcctcattttctaaatattgctctttccgttacaggacatgtttttgcatatggactctctagatcagcagcaataacaaacatggctcttgcattaaaagagattcaaattcgtggagaaattcattcaaatgttgattacactgttgacctcttaaacgtatgaaatattaaccaccttttgaatccctgttttcattatgctgattcatatcattatgtttgattttccattatggctaaacctgtggtgctatttccctattattccaggcttcagacttcagagaaaacaagattcatactggttggctggataccagaatagctatgcgtgttcaagctgagaggcccccatggtatatttcagtggttggaggtgctttatacgtaagataaagaaatcatgctaacatcttttgtcaaactactgtgaaaaacatacgatgtaaggtctaatttaaataattgtcacatgctacagaaaacagtaaccaccaatgcagccactgtttctgactatgttagttatctcaccaagggccagattccaccaaaggtatgttttgtgggattaactctggatatttttaaggtgaaaaatggttgacgaataatatttttatgcagcatatatcccttgtcaattctacagttagcttgaatatagaagggagcaaatacacagtaagtttgacattccacaagggaatttattttagttgtaacaataaagttagacatcattctgagtttcgtctgcattgtgttgtagattgaaactgtaaggactggacatggtagctacaggttgcgaatgaatgaatcgacagttgaagcgaatgtacaatctttatgtgatggtggactcttaatgcaggtaacttgttctttcttttgtgcattattattaattagttggataaatggttttgatttcatggcggttctgattgttgaattgcaatggctccagttggatggaaacagccatgtaatttatgcagaagaagaagctggtggtacacggcttcagattgatggaaagacatgcttgttgcaggtaaatactcccttcctctatattcttggtgtctgattgggcaacttctgccagatttatctgtatcatttattattgcattttggtccactaccttatctttaaaagatgggttctgttgtttgcttccgcaggagacatcacataagaaaattgttactaatccttgttttcttgcagaatgaccatgatccatcaaagttattagctgagacaccctgcaaacttcttcgtttcttggttgctgatggtgctcatgttgatgcggatgtaccatacgctgaagttgaggttatgaagatgtgcatgcctctcctgtcacctgcttctggtgtcgttcattgtatgatgtctgagggccaggcgttgcaggttatattcttacatgtccattccttgcattgtgctttcatcccataatatttcatgtaacatttgtcaaattacatttgttttaggctggtgatcttatagcaaggctggatcttgatgacccttctgctgtgaaaagggctgaaccatttgatggaatatttccacaaatggcgctccctgttgctgcctctagtcaagtacacaaaagatatgctgcaagtttgaatgctgctcgaatggttcttgcaggatatgagcacaatatcaatgaagtaaacattccatcttattgtgaccacatcctgtttattttctttgtttatcttgtgtttcctttacttagatagtttctacaaaaatgatcttttgtccagtcacatgtcttctccctcactcatctacctatcatatctcttcatgtcttggtttccgtgtatacatggtttcttattaagaaaccatttccccctcttctttaattgtagtgccacatcatcatttctgtttagtttgcaccctaattaatgaacatataaaccatgtagtttctgggttgggagtgcccttagcacttggttatccattatcaactgattcatgttaagctattcttcttttcaggtcgttcaagatttgatatgctgcctggacaaccctgagcttcctttcctacagtgggatgaacttatgtctgttctagcaacgaggcttccaagaaatctcaagagtgaggtatgagacagttggcaagatatagccaatctggattaaaggaaagatgattcattttagtagatatattatcttaattttgcattttacatattggcttatgttgatggcagaaaaagccatcagagaaactgtgatattttataacattagtttgcaccgtgttatgctcataaataaacctgacaatggtttgggccggaaccagtttccatggtttgatttccttgttgggccaattcaatttgggtgaaaacgggctgagcaagctggtgggctggttcagtctgagttattacttagagtagtttagtttggtttggtttggttttggactgagtgttttggcttgataacaggctgaagctgtggttccaacccagcatcacaccacggtacagcagaagccccatccgcgtccactagtattcctattgtattactggatttgtttttctataggaaaacggccataaagtgtagcatgacgtcatgctgatgttgacaagctaggaatgaagcagagcacacacaacactcagccggctactcgctccgcgccgcgcagcagcgcatgtcacgcatgcacatgtgggaggacgtgcacagacgtccgtgctcggctcggccacgctcgggacctcgtggttgccggagctgccgggagcggtgcgaatggcggcgcatggccggacggaggagaggctcgcgctgcactgcttgggctttgccagcctcaagacctccggtgccgtcaagctcgtggatgccgcggtgctggcgcgctccctgcccaggctctactctctcttacctgctctccatcctctccagcttcagtgacctgcgggagttcatcatttcagcgcccggagctgtatcagcttctataacaaggacgaggaggtgctcaggcaaggggccaggatccagcggttcgacgtcagagggtccaagttggtggacgagatagagaatgagttcgccggtggtgaagttttctgcgactcgtcctacgttgaagtgatgtgatctctgtctgaaccattccacgatgacagttcgaagtcggtttcgaatcccggttgtaggctgtggactggtcttgtttggatttaggaacactacagtttggcgtggactggttttggagggggaacgagtggggtggattggggatttgaaggcagacgtgattagtttggtttggttatggtctggatcacggaccattaacaggtttactcataaaaatcgtttagttttttctgcagtttgttttgtaaaatttgatgaaaacttagaatttttcactctagcattttaccggaaggtgaatctttcagtaagtttgttttgattctgtgattgtagttctggtatgtccttacataatccatttttattctagcttctgatgtttttatcttttatgcatgcagttagaggataaatacaaggaatacaagttgaatttttaccgtggaaaaaacgtggacttcccttccaagttgctaagagacatcattgaggtcagttatgtttcttttgtggtatctcttaaactgtttgctattgtcttaatcttaactagtgttttctctgtaggaaaatcttgcatatggttcagagaaggaaaaggctacaaatgagaggcttgttgagcctcttacgaacctactgaagtcatatgagggtgggagagaaagtcatgcacattttattgccaagtcccttttcgaggagtatcttatggtggaagaacttttcagtgatggaattcaggttattgtacatgacaagactgaacagatcagtattagaaaaagcacacaaaatgttcactccttttcactctcttagttgggagaaactttttgcatggctagctgtatttattcgaacaatctgacttgttatttgtctctaattatgtcatggcagtctgacgttattgaaaccttgcgtcatcagcacagtaaagacctgcagaaggttgtagacattgtgttgtctcaccaggtaaatttctttatggctgatgacttttatgcaaatgattagtgaaacaatctttgttattgatagtgtgattttattcacagggtgtgagaaacaaagctaagcttgtaacagcactcatggaaaagctggtttatccaaatccggttgcttacagggatctgttggttcgcttttcttccctcaatcataaaagatattataaggtgcagtgattacaataacctagacatcccccttataatttattttgatgttctacctaatgaattccatgcatcttaataaacacagttggcccttaaagcaagtgaacttcttgaacaaaccaaactaagtgaactccgtgcaagcattgcaagaagcctttcagatctggggatgcataagggagacatgactattaaggatagcatggaagatttagtctctgccccattgcctgttgaagatgctcttatttctttgtttgattacagcgatgcaactgttcagcagaaagtgattgagacatacatatcacgattgtaccaggtattatatcaactaagttgatgtctttcatagtcccactaagcatatctgatatgttagatgccctaatgacatggaatgctcatctcttcatttcacatgaagaaatattgagaaatgagatgctgatgtttggctgaattaactgggtgtgaaaaattgtgatctcccaacttgttaatgcacaatgtgctggctaacttgccaatatatatttttttttcagcctcatcttgtgaaggatagcatccaaatgaaattcaaggaatatggtgctattgctttttgggaattttctgaagggcatgttgatacttcaaatggacatgggactattcttggtgggaagagatggggttccatggtcgtcctcaaatcacttgaatctgcatcaacagccattgtggctgcattaaaggattcagcacagtacaacagctctgagggcaacacgatgcacattgcattattgagtgctgaaaatgaaagtaatatgagtggaacaaggtttgttcatgtgcaatattaggtcgaaaggggtttttgtttaagttgtgtaactcttttttcttttaattgaggccatttctttcagcagtgatgatcaagctcaacataggatggaaaagcttaccaagatactgaaggatactaatgttgcaagtgatctccgagctgctggtttgaaggttataagttgcattgttcaaagagatgaagctcgcatgccaatgcgccacacattcctctggttggatgaaaagagttgttatgaagaagagcaaattctccggcatgtggagcctcccctctctgcacttcttgaattggtctgtttatcaaaatgattgcatgcttgtttgctacattctgttattatgctttgcttattttcttcactatacttattttgcctattatgaatacaggataagttgaaagtgaaaggatacaatgaaatgaagtatactccgtcacgtgatcgtcaatggcatatctacacactaagaaatactgaaaaccccaaaatgttgcatagggtatttttccgaactattgtcaggcaacccaatgcaggcaacaagtttacatcagctcaggtcagtgatactgaagtaggaggtcctgaagattctctgtcattcacatcgaatagcatcctaagatcattgatgactgctatagaagaattagagcttcatgcgattaggacaggtcattctcacatgtatttgtgcatactgaaagagcaaaagcttcttgatctcattccattttcagggtaagtgtgcacataatcctattcaaggaaatgtttatgcattgactattatatcggtctccttaacaagcttttcatattattcaggagtacaattgttgatgttggccaagatgaagctactgcttgttcacttttaaaatcaatggctttgaagatacatgaccttgttggtgcaaggatgcatcatctgtctgtatgccagtgggaggtgaaactcaagttggattgtgatgggcctgcaagtggtacctggagagttgtgactacaaatgttactagtcacacctgcaccattgatgtaagttgtccctactgttttagtattctgtatatcacacacatgaaagtataagtcaatgtgtggttcttatattctgaactgccatccatgtcattatgttctgaagcacatagtacttctaatggttttagatctaccgagaagtggaagatacagaatcgcagaagttagtataccattcaaccacttcggcagctggtcctggtccgttgcatggtgttgcactgaataatccatatcaacctttaagtgtgattgatctaaagcgctgctctgctaggaacaacagaacaacatattgctacgattttccgctggtgagttgacccccgccccacccctcagtgaatacacatctgtagttttttgaacctaagctgataatgaaaaaaaaaatgtaggcatttgaaactgcactgcagaagtcatggcagtccaacggctctagtgtttctgtaggcagtggaaatagtaaatcctacgtgaaggcaactgagctggtgtttgctgaaaaacatgggtcctggggcactcctatagttcccatggaacgtcctgctgggctcaatgacattggtatggtcgcttggatcttggagatgtcaacacctgaatttcccaatggcaggcagattattgttgtagcaaatgatattactttcagagctggatcattcggcccaagggaagatgcattttttgaagctgtcaccaacctggcttgtgaaaggaaacttccccttatatacttggcagcaaactctggtgctaggattggcatagctgatgaagtaaaatcttgcttccgtgttgggtggtctgacgaaggcagccctgagcgagggtttcagtacatctatctgactgaagaagactatgcccgtattagctcttctgttatagcacataagctgcagctagatagcggtgaaattaggtggattattgactctgttgtgggcaaggaggatgggcttggtgttgagaacatacatggaagtgctgctatcgccagtgcttattctagggcatatgaggagacatttacacttacatttgtgaccggacggactgtaggaataggagcttatcttgctagacttggtatacggtgcatacagcgtcttgaccagccgattattttaacagggttttctgccctgaacaagctccttgggcgggaagtgtacagctcccacatgcagcttggtggtcctaagatcatggcgaccaatggtgttgtccacctgactgttccagatgaccttgaaggtgtttccaatatattgaggtggctcagctatgttcctgcaaacattggtggacctcttcctattaccaaacctttggaccctccagacagacctgttgcatacatccctgagaacacatgcgatccacgtgcagccatccgtggtgtagatgacagccaagggaaatggttgggtggtatgtttgacaaagacagctttgtggagacatttgaaggatgggcaaaaacagtggttactggcagagcaaagcttggaggaattcctgtgggtgtcatagctgtggagacacagaccatgatgcagcttgtccctgctgatccaggtcagcttgattcccatgagcgatccgttcctcgggctggacaagtgtggttcccagattctgcaaccaagacagctcaggcattattagacttcaaccgtgaaggattgcctctgtttatcctggctaactggagaggtttctctggtggacagagagatctctttgaaggaattcttcaggctgggtcaacaattgtcgagaaccttaggacatataatcagcctgcgtttgtctacattcctatggctggagagcttcgtggaggagcttgggttgtggtcgatagcaaaataaatccagaccgcattgagtgttatgctgagaggactgccaaaggtaatgttctcgaacctcaagggttaattgaaatcaagttcaggtcagaggaactccaagactgtatgggtaggcttgaccccgagttgataaatctgaaagcaaaactccaagatgtaaagcatggaaatggaagtctaccagacatagaatcccttcagaagagtatagaagcacgtacgaaacagttgctgcctttatatacccagattgcaatacggtttgctgaattgcatgatacttccctaagaatggcagctaaaggcgtgattaagaaagttgtagactgggaagaatcacgctctttcttctataaaaggctacggagaaggatctctgaagatgttcttgcaaaagaaataagacatatagtcggtgacaacttcactcaccaatcagcaatggagctcatcaaggaatggtacctggcttctccagccacagcaggaagcactggatgggatgacgatgatgcatttgttgcctggaaggacagtcctgaaaactacaatggatatatccaagagctaagggctcaaaaagtgtctcagtcgctctctgatctcactgactccagttcagatctacaagcattctcgcagggtctttctacgctattagataaggtaaatttgcttacagtttcaccttattttttatttgcaattaacctgtgggctacaaccggttgtatctgttgcatgttactttttaagagctcctatttcaattgcattgcatacatggcatcttatcaattcatgattctaatacatacccattgccttctcacgtattccgtctttggatgccgattcagatggatccctctcaaagagcgaagtttgttcaggaagtcaagaaggtccttggttga

SEQ ID NO: 953 - protein, 2327 aa, Sorghum bicolor; identical to SEQ ID NO: 22

SEQ ID NO: 954 - protein, 2327 aa, Oryza sativa; identical to SEQ ID NO: 4

SEQ ID NO: 955 - DNA, 12072 bp, Hordeum vulgare
  source 1..12072: mol_type = genomic DNA
atgggatccacacatttgcccattgtcggatttaatgcctccacaacaccatcgctatccactattcgccagataaattcagctggtgctgcattccaaccatctgccccttctagaaactccaagaagaaaagtcgtcgtgtccagtcattaagggatggaggcgatggaggcgtgtcagaccctaaccagtctattcgccaaggtaacctgaaaaccatttcctttctacaaactgcactttgttgtcatcctcaacttgtatagatacttttattgactcagagcatgttggttttagtgtaagatatctcaatgctagatcacataatggcggttattgaccttgttaaagatgcaaatgactgcagcaatatttacctatttttttatgtgatataatagcactttcctataatgagtacccaatatttcttgattaaatggttttaattggaaggatgtttaatattgaaaatgatgttttataagggaaaggaacatggaagtgcaagaatacatgtaagcagcattttaattatgtatgactgaatcattttccttacataatactccctccgtaaagaaatataaaagcgtttagatcactagtgacgtttctggtaatttactagcatgaagaacaataacatttgtaaagttggcaccagtgcttcttcttagctattttgtaaacttcctcagtttctaatgcttatctggatgtaggcctcgccggcatcatcgacctcccaaaggagggcacatctgctccggaagtggatatttcacagtaagtacttgagcattttaaaattagcctagctctctttaaaatggaaaaaatgtatagttcaatctagaattattctagattatgctgattttattattcgcatatgctgatatatttgtagttttttttactgaactacataatagttgctatacactgcatttgctcaggcacatcacttttgcactgcatgtagtatttttgggcaaacacaaaacactttcggaaattcttttgcctataattttaaaaataacaatttaagtaccatctgaaacctgtacccacatggcggatgaaagctcatttgaactttttgatttattgtagccaattatttgttatgttatattgttatatggtcgccactgtaatgattttgttcttttttttctagtgggtccgaagaccccaggggatcctaccaaatgaatgggatactgaatgaagcacataatgggaggcatgcttccctgtctaaggttgtcgaattttgtatggcattgggcggcaaaacacccattcacagtgtattagttgccaacaatggaatggcagcagctaagttcatgcgaagtgtccggacatgggctaatgaaacatttgggtcagagaaggcaattcagttgatagctatggctactccagaagacatgaggataaatgcagagcacattagaattgctgatcagtttgttgaagtacccggtgggacaaacaataacaactatgcaaatgtccaactcatagtggaggttagtattgctcatccgtcgatgtgcaatcaatgcacaagttgttcatttagcatgacatgacagttttgctgtttcagattgcagtgagaaccggtgtttctgctgtttggcctggttggggccatgcatctgagaatcctgaacttccagatgctctaactgcaaatggaattgtttttcttgggccaccgtcatcatcaatgaacgcactaggtgacaaggttggttcagctctcattgctcaagcagcaggggttccgactcttccttggagtggatcacaggtgaatctcatattctctgataactcatcgtctgatctttgcactggacacttttttataaccgaaatacactgtattataggtggaaattccattagaagtttgtttggactcgatacctgaggagatgtataggaaagcttgtgttagtactacggaggaagcacttgcaagttgtcagatgattggttatcccgccatgattaaagcttcatggggtggtggtggtaaagggatcagaaaggtacgtcattcattgattggactatccaaaagattgtgtgggctgtgtgatattttatgcccagatttagctctaacctttttaacatattaactcaatatctgttgcaggttaataacgacgatgacgtcagagcactgtttaagcaagtgcaaggtgaagttcctggctccccaatatttatcatgcgacttgcatctcaggttagacttctctggaagttgcatttttccaagcatgttgttccagttgtactatattatatgcctggaagcttcatctgttcttccttgcaggctagaaacgtatcctggaacctgtgctcatatggtatattatgttctaatcctccccttttttcttttctagagtcgacatcttgaagttcagttgctttgtgatcaatatggcaatgtagctgcacttcacagtcgtgattgcagtgtgcaacggcgacaccaaaaggtacgctggtccagatctgaaaacatcacttgtattacatgttctaattcatacctgtagcgttgatcaaaagaaggattgattgcgtccattttttgtttataacagattattgaggaaggaccagttactgttgctcctcgtgagacagtgaaagagttagagcaagcagcaaggaggcttgctaaggctgtgggttatgttggtgctgctactgttgaatatctctacagcatggagactggtgaatactactttctggagcttaatccacgattgcaggtatgttcttttgaacattcctcaggacttactttttgtcggcagtcgtttacattgttaagtggcatacattcaggttgagcatccagtcaccgagtggatagctgaagtaaacttgcctgcagctcaagttgcagttggaatgggtatacccctttggcaggttccaggtaataatcatattattgtaagttttttagttactacctgtgttatttctgtgcctaactttctccttatacagagatcagacgtttctatggaatggacaatggaggaggctatgacatttggacgaaaacagcagctcttgctactccatttaactttgatgaagtcgattctcaatggccgaagggtcattgtgtagcagttaggataaccagtgaggatccagatgacggattcaagcctaccggtggaaaagtaaaggtgagatttcctgatgacgtctatggttcaagcacattagatttgtaacctgactggatcttgtttttcttataattcaggagatcagttttaaaagcaagccaaatgtttgggcctatttctctgttaaggtaagctgttcatggctctgttgcactgttatattgttaagttgtgcagaaaattgggctgcattttttttccgaactagtttcttcatctgggctttggctatgtattaaccaaatcgaacacattgtcttccccccttttatctgttttcagtccggtggaggcattcatgaatttgctgattctcagtttggtatgcaaaatttgaccccgtgaatattcctctttgctatttatattggtccttacgtttggaagattactcttttcattacaggacatgtttttgcatacggagtgtctagagcagcagcaataaccaacatgtctcttgcgctaaaagagattcaaattcgtggagaaattcattcaaatgttgattacacagttgatctcttgaatgtaagaaataacacctgtatactgaatccctgcttttgatgtaatacaaccattttacatctggcattcctttaaagtaatcccatgccttcattttctgtatctctaaatcaggcctcagacttcaaagaaaacaggattcatactggctggctggataacagaatagcaatgcgagtccaagctgagaggcccccctggtatatttcagtggttggaggagctctatatgtaagaaaccatgcccctcttactgcagcttttgccaaaccaattgtgaaaaacagttagttgtttaatgcaaattactgttttgtgctgcagaaaacaataacgagcaacacagacactgtttctgaatatgttagttatctcgtcaagggtcagattccaccaaaggtagtgttttaatgggcttgaactctggatattgcttgaagatgaacgttgttgaatgttgaccaatttcttttgtgcagcatatatcccttgtccattcaactgtttctctgaatatagaggaaagcaaatatacagtaagtcttgcattccttaaaaaaagtcagtcgttgtaatgaagtaacagctatcatcgatgctcatgtacaccatgtcacagattgaaactataaggagcggacagggtagctataggttgcgaatgaatggatcagttattgaagcaaatgtccaaacattatgcgacggtggacttttaatgcaggtgattttgtcttgtttttatacctgcccataagtatgatatataatgttgtgaagtactggtgaaagagttctgattctgtagttctaatgtctgcagttggatggaaacagtcatgtaatttatgctgaagaagaggccggtggtacacgtcttctaattgatgggaagacatgcttgttacaggtaataattgtctgtttattcctttctttctaactaatcttggtgtttgatttgatattttccacttcattagcattcatttctttccatttcatttaaagaaactgaattatgatgtttatttgtagtcatgtgccataagaaaccacaattaaatcattgttacggactaattgatgtcgcaacaagctattgtggtaaatgtgactgcctaagcagccaaacaaaccaggtcataatgagaagcgtcatcaaccgcatgtcttgtgaagttgtgatgttaagacaacttacatagctgtaataaacttaatagggttccagtttttgtattgctacttctgtttcttaatttgagttactaccgacgacaatgttttgtaattatgacaatcatgaatatattataatcaagctgtgataaactttgtcatgaaccttctagggcatcatgttaccgcatcatttttttggtgataaaaaaagaaactattaatactttatgaattcttgatcatgcttcattgtatccttgtgtgaataaatgacacatcgttcttgcagaatgatcacgatccttcaaggttattagctgagacaccctgcaaacttcttcgtttcttggttgccgatggtgctcatgttgaagctgatgtaccatatgcggaagttgaggttatgaagatgtgcatgcccctcttgtcgcctgctgctggtgtcattaatgttttgttgtctgagggccagcctatgcaggttacatcacaacgtttccattgcttctgctgtacataacaactgcacgtaaagtatctgagcttaatatattttgtgtaggcgggtgatcttatagcaagacttgatcttgatgacccttctgctgtgaagagagctgagccatttaacggatttttcccagaaatgagccttcctattgctgcttctggccaagttcacaaaagatgtgccacaagcttgaatgctgctcggatggtccttgcaggatatgatcacccgatcaataaagtaagcatcaagaaccttgcagtacctatatttctggttttttgccttctgtttcttgttcttttgaaacaccttttttatatgttatgaattctggattatccctattcctccttggcgttggctcccttccactacaaaactgttcgtaacctatggaagtttattatgcctgtcttggaaaatcttgatttgggtgctctttctcctatgttcaccatgctcagtacttactttacgcaatgtttttacccttgtgctatttccccctctttcagcaatttatatttttgtttgattttttttccaatcataactgttcagcatttgattacttttttcattgtacttggttttcttttcaggttgtacaagatctggtgtcctgtctagatgctcctgaccttcctttcttacaatgggaagagcttatgtctgttttagcaactagacttccaaggcttcttaagagtgaggtatgtcataatagatgtgatatgtagcgtctggttagatttcagtctgctacgtggatttttttattgatgatatagaagggttgtatcacttcttataagcatcatggcactctatcttgttaatttttcattttacattgtccattcactggtaatttgccgtagcttcttgtgtaacttttaaaattatattttcctaatatcaaaactcgaaatatttcattttaattcttctttgcttggaacatttggtacttcatctcatcaattcacactgtacctcagaagttctgatttgattttaatccatttcttgtttattgatctttatatatttttgtgtgttctacctcaacggtttctactttttatgcatccagttggagggtaaatacagtgaatataagttaaatgttgagcatggaaagaagaaggatttccctgccaagatgctaagagagataatcgaggtcagtattaggtttcttttatggtatccttgtctagaacttataccgttctttgtaacatgttctgttgtaggaaaatcttgcacatggttctgagaaggaaattgctacaaatgagaggcttgttgagcctcttatgagtctgctgaagtcatatgagggtgggagagaaagccatgcacactttatagtgaagtcccttttcgaggagtatctctcggttgaggaactattcagtgatggcattcaggttatcttgcattccaaaactgagatctactagatatcattgttttaaaaggactttttcccttatatttacaagaatattatcaactaatatttatgcacatattaatttcatcagaatctatcagtaattaagtagcaaatgattttagttgtaaaaaaagtagcaaatagtttttatatggctatggcttatttgttgttttaaactgtcatattttgtagtccgatgtgattgaacgcctgcgccaacaacatagtaaagatctccagaaggttgttgacattgtgttgtctcaccaggtgaatattttgtgatctgatggcttagggcaaatgatggctgaagcaatcttcattactgatagtttgattttgttgtagggtgtgagaaacaaaactaagctgatactaacactcatggagaaactggtctatccaaaccctgctgcctacaaggatcagttgactcgcttttcttccctcaaccacaaaagatattataaggtgacaatggcgacctaaaataacggaagcttttgaatcatattattttctgatatctcagcctaatcaattacccgcatcataataaatgcagttggcccttaaagctagcgagcttcttgagcaaaccaagcttagcgagctccgcacaagtattgcaaggagcctctcagaactggagatgtttactgaagaaaggacggctattagtgagatcgtgggagatttagtgactgccccactgccagttgaagatgcactggtttctttgtttgattgtagtgatcaaactcttcagcagagggtgatcgagacatacatatctcgattataccaggtatacatttttttgttttgtttttgaacttgatcatgctctccctttgcatttctgggaagcatacactaaagttcctattgaaacaagatgcttagtgcttcttaaaagaacatctgagagaatctaggtgtggaaatatttgattgtactgcatctttgctcttcaagttggctaacaccaataatattttcagcctcatcttgtgaaggatagtatccagctgaaatatcaggaatctggtgttattgctttatggcaattcactgaagggcattcagagaagagattgggtgctatggttattgtgaagtctctggaatctgtatcagcagcaattggagctgcactaaaggatacatcacgcttttcaagctctgagggtaacataatgcatattgctttgttgggcgctgattatcaaatgcatggaactgaagacaggtatgttcatgtgcaatattagtggtaatcagctgtatctggttattagtatttggtggaattcctttaattatttaactcattcctttcagtggtgataacgatcaagctcaagttaggatagacaaactttcttccacactggaacaacatactgtcacagctgatctccgtgctgctggtgtgaaggttattagttgcattgttcaaagggatggagcactcatgcctatgcgccataccttcctcttgtcggatgaaaagcttagttacgaggaagagccgcttctacggcacgttgagcctcctctttctgctcttcttgagttggtatgtaactgtatcaaaacgcctgcatttctttgatacactatccacatgctttaattatcttgtttgctatttgtatttatttagcctgttgtggttacagggtaagttgaaagtgaaaggatacaatgaagtgaagtatacgccgtcacgtgatcgtcagtggaacatatacacgcttagaaatacagaaaaccccaaaatgttgcacagggtgtttttccgaactcttgtcaggcaacccagtgcctccaacaaattcacatcaggccatatcagtgatgttgaagtaggaagtgcggaggaatctctttcatttacatcgagcagcatattaagatcgttgatgactgctatagaagaattggagcttcatgcgattaggacaggtcactctcatatgtatttgtgcatattgaaagagcaaaagcttcttgatcttgttcctgtttcagggtaagcctgcatattgtcattttgttgcacataataggtcttcctcttgtgttttgccttcaatgaacttttcatcttactcaggaacaaagttgtggatgttggccaagatgaagctactgcatgctcgcttctgaaagaaatggctctaaagatacatgaacttgtgggcgcaaggatgcaccatctttctgtatgccaatgggaagtgaaacttaagttggacagtgacggtcctgccagtggtacctggagagttgtaacaaccaatgttaccagtcatacctgcactgtggatgtaagttccttccccttacatcttgtttttctgcgtgtaaccagcaaaactgaagtgaacttataacatttattcatagagctattatgttcattttgctgtcatttcaacctaattatgtttggaagctcatggtgcttttaatgctttcagatctaccgggaagttgaagagacagaatcacagaaactagtataccactctgctgccttgtcatctggtcctttgcatgggatcgcactgaataatccatatcagcctttgagtgttattgatctgaaacgttgctctgctagaaacaacagaactacatactgctatgattttccgttggtgagtatctctctttctcgctatatatgtatctactgtattagtagattcttagtgacgtattacatgtccaaacgctgacaagaactcaaattgtaggcatttgaaactgcagtgcagaagtcatggtctaacatttctagtgacagtaaccgatgttacgttaaagcgacagagctggtgtttgctcacaagcatggatcatggggcactcctgtaattcctatggagcgtcctgctgggctcaatgacattggtatggtagcttggatcttggacatgtccactcctgaatatcccaatggcaggcagattgttgtcatcgcaaatgatattacttttagagctggatcatttggcccaagggaagatgcattttttgaaactgttaccaatctagcatgtgagaggaagcttcctctcatctacttggcagcaaactctggtgctcgtattggcatagcagatgaagtgaaatcttgcttccgtgttggatggtctgatgatggcagccctgaacgtgggttccagtacatttatctgactgaagaagaccatgctcgtattagcgcttctgttatagcgcacaaaatgcagcttgataatggtgaagttaggtgggttattgattctgttgtgggcaaggaggatggactaggtgtggagaacatacatggaagtgctgctattgccagtgcttattctagagcatatgaggagacatttacgcttacgtttgtgactggacggactgttggaataggagcgtatcttgctcgacttggcatacggtgcatacaacgtactgaccagccaattatcctaactgggttctctgcgctgaacaagcttcttggccgggaagtgtacagctcccatatgcagttgggtggccccaaaatcatggcgacgaatggtgttgtccatctgactgtttcagatgaccttgaaggtgtttctaatatattgaggtggctcagctatgttcctgccaacatcggtggacctcttcctattacaaaatctttggacccacctgatagacccgttgcatacatccctgagaatacatgtgatccccgtgcagccatcagtggcattgatgacagccaagggaaatggttggggggcatgttcgacaaagacagttttgttgagacatttgaaggatgggcgaagtcagtagttactggtagagcgaaactgggagggattccagtgggtgttatagctgtggagacacagactatgatgcagctcatccctgctgatccaggccagcttgattcccatgagcggtctgttcctcgtgctgggcaagtctggtttccagattctgctaccaagacagcgcaggcgatgttggacttcaaccgtgaaggattgcctctgttcatccttgctaactggagaggcttctctggtgggcaaagagatctttttgaaggaattcttcaggctgggtcaacaattgttgagaaccttaggacatacaatcagcctgcctttgtatatatccccaaggctgcagagctacgtggaggggcttgggttgtgattgatagcaagataaatccagatcgcattgagttctatgctgagaggactgcaaagggcaatgttctcgaacctcaaggtttgattgagatcaagttcaggtcagaggaactccaagagtgcatgggcaggcttgatccagaattgataaatcttaaggcaaaactccagggagcaaagcatgaaaacggaagtctatccgagttagaatcccttcagaagagcatagaagcccgtaagaaacagttgctgcctttgtatactcaaattgcggtacggtttgctgaattgcatgacacctcccttagaatggctgctaaaggtgtgattaagaaagttgtggactgggaagattctaggtcgttcttctacaagagattaaggaggaggatatccgaggacgttcttgcaaaggaaattagaggtgtaagtggcaagcagttttctcaccaatcagcaatcgagctgatccagaaatggtacttggcttctaaggaggctgaaacaggaagcaccgaatgggatgatgatgatgcttttgttgcctggagggaaaaccctgaaaactaccaggagtatatcaaagaactcagggctcaaagggtatctcagttgctctcagatgttgcagactccagtccagatctacaagccttgccacagggtctttctatgctactagagaaggtacgcatacttactgttttacctgcatctgttttacatgatagtaatttatcaaaatttttttttgccatcttcaaaattatgcatagtgtcttaccatataatgttaatgttttttctttggccacttgttcagatggatccctcaaggagagcacagtttgttgaggaagtcaagaaggtccttaaatga

SEQ ID NO: 956 - protein, 2311 aa, Hordeum vulgare
MGSTHLPIVGFNASTTPSLSTIRQINSAGAAFQPSAPSRNSKKKSRRVQSLRDGGDGGVSDPNQSIRQGLAGIIDLPKEGTSAPEVDISHGSEDPRGSYQMNGILNEAHNGRHASLSKVVEFCMALGGKTPIHSVLVANNGMAAAKFMRSVRTWANETFGSEKAIQLIAMATPEDMRINAEHIRIADQFVEVPGGTNNNNYANVQLIVEIAVRTGVSAVWPGWGHASENPELPDALTANGIVFLGPPSSSMNALGDKVGSALIAQAAGVPTLPWSGSQVEIPLEVCLDSIPEEMYRKACVSTTEEALASCQMIGYPAMIKASWGGGGKGIRKVNNDDDVRALFKQVQGEVPGSPIFIMRLASQSRHLEVQLLCDQYGNVAALHSRDCSVQRRHQKIIEEGPVTVAPRETVKELEQAARRLAKAVGYVGAATVEYLYSMETGEYYFLELNPRLQVEHPVTEWIAEVNLPAAQVAVGMGIPLWQVPEIRRFYGMDNGGGYDIWTKTAALATPFNFDEVDSQWPKGHCVAVRITSEDPDDGFKPTGGKVKEISFKSKPNVWAYFSVKSGGGIHEFADSQFGHVFAYGVSRAAAITNMSLALKEIQIRGEIHSNVDYTVDLLNASDFKENRIHTGWLDNRIAMRVQAERPPWYISVVGGALYKTITSNTDTVSEYVSYLVKGQIPPKHISLVHSTVSLNIEESKYTIETIRSGQGSYRLRMNGSVIEANVQTLCDGGLLMQLDGNSHVIYAEEEAGGTRLLIDGKTCLLQNDHDPSRLLAETPCKLLRFLVADGAHVEADVPYAEVEVMKMCMPLLSPAAGVINVLLSEGQPMQAGDLIARLDLDDPSAVKRAEPFNGFFPEMSLPIAASGQVHKRCATSLNAARMVLAGYDHPINKVVQDLVSCLDAPDLPFLQWEELMSVLATRLPRLLKSELEGKYSEYKLNVEHGKKKDFPAKMLREIIEENLAHGSEKEIATNERLVEPLMSLLKSYEGGRESHAHFIVKSLFEEYLSVEELFSDGIQSDVIERLRQQHSKDLQKVVDIVLSHQGVRNKTKLILTLMEKLVYPNPAAYKDQLTRFSSLNHKRYYKLALKASELLEQTKLSELRTSIARSLSELEMFTEERTAISEIVGDLVTAPLPVEDALVSLFDCSDQTLQQRVIETYISRLYQPHLVKDSIQLKYQESGVIALWQFTEGHSEKRLGAMVIVKSLESVSAAIGAALKDTSRFSSSEGNIMHIALLGADYQMHGTEDSGDNDQAQVRIDKLSSTLEQHTVTADLRAAGVKVISCIVQRDGALMPMRHTFLLSDEKLSYEEEPLLRHVEPPLSALLELGKLKVKGYNEVKYTPSRDRQWNIYTLRNTENPKMLHRVFFRTLVRQPSASNKFTSGHISDVEVGSAEESLSFTSSSILRSLMTAIEELELHAIRTGHSHMYLCILKEQKLLDLVPVSGNKVVDVGQDEATACSLLKEMALKIHELVGARMHHLSVCQWEVKLKLDSDGPASGTWRVVTTNVTSHTCTVDIYREVEETESQKLVYHSAALSSGPLHGIALNNPYQPLSVIDLKRCSARNNRTTYCYDFPLAFETAVQKSWSNISSDSNRCYVKATELVFAHKHGSWGTPVIPMERPAGLNDIGMVAWILDMSTPEYPNGRQIVVIANDITFRAGSFGPREDAFFETVTNLACERKLPLIYLAANSGARIGIADEVKSCFRVGWSDDGSPERGFQYIYLTEEDHARISASVIAHKMQLDNGEVRWVIDSVVGKEDGLGVENIHGSAAIASAYSRAYEETFTLTFVTGRTVGIGAYLARLGIRCIQRTDQPIILTGFSALNKLLGREVYSSHMQLGGPKIMATNGVVHLTVSDDLEGVSNILRWLSYVPANIGGPLPITKSLDPPDRPVAYIPENTCDPRAAISGIDDSQGKWLGGMFDKDSFVETFEGWAKSVVTGRAKLGGIPVGVIAVETQTMMQLIPADPGQLDSHERSVPRAGQVWFPDSATKTAQAMLDFNREGLPLFILANWRGFSGGQRDLFEGILQAGSTIVENLRTYNQPAFVYIPKAAELRGGAWVVIDSKINPDRIEFYAERTAKGNVLEPQGLIEIKFRSEELQECMGRLDPELINLKAKLQGAKHENGSLSELESLQKSIEARKKQLLPLYTQIAVRFAELHDTSLRMAAKGVIKKVVDWEDSRSFFYKRLRRRISEDVLAKEIRGVSGKQFSHQSAIELIQKWYLASKEAETGSTEWDDDDAFVAWRENPENYQEYIKELRAQRVSQLLSDVADSSPDLQALPQGLSMLLEKMDPSRRAQFVEEVKKVLK

SEQ ID NO: 957 - DNA, 12174 bp, Triticum aestivum
  source 1..12174: mol_type = genomic DNA
atgggatccacacatttgcccattgtcggccttaatgcctcgacaacaccatcgctatccactattcgcccggtaaattcagccggtgctgcattccaaccatctgccccttctagaacctccaagaagaaaagtcgtcgtgttcagtcattaagggatggaggcgatggaggcgtgtcagaccctaaccagtctattcgccaaggtaaactgaaaaccatttccttcctacaaactacactttgttgtcatcctcaaacttgtgtagatacttttattgactgagagcatgctggtgttagtgtaagatatctcaatgctagatcacagaatggcggttattgaccttgttaaagatgcaaatgactgcagcaatatttaacacttttttatgcgatacaaatacaatagtagttcttctatataatgagtaatgagtaaagcccagtttttcttgattaaatggttttagtggaaggaatgtttaatgttcaaaatgatggtttataagggaaaggaacatgaaagtgcaagaatacatataagcagcatattagttatgcaagactgaatcattttccttatataatacttctaaaagagaaggatgtctagaaaccttttctgataatttactagcatgaagaacaataacattcgtaaattgacacctgtgcttcttcttagctatcgtgttgctcagtttctaatgcatatctggatgtaggtcttgccggcatcattgacctcccaaaggagggcacatcagctccggaagtggatatttcacagtaagtacttgagcattttaaaattagaattagcatatctctctttaaaaaggaaaaatatgtatagtttaatatagaattattatagattatgcttattttattattcgcatatgctgatattttgaattgcatttgatatatttttatagatttttactgaactacattatagttgccatacacaatgcatttgctcaggcacatcactgttgcactgcatggagtatttttgtgcacttaggaatcattttcagaaagccttttgcctataattttaaaaataataatttaattaccatctgaaacccgtacccgcatgacggatgaaagctcatttgaagttttcgatttatagtagccaagtgtttgttatgttatattgttatggtcaccatcgtaatgattttgttcttttttctctagtgggtccgaagaacccaggggctcctaccaaatgaatgggatactgaatgaagcacataatgggaggcatgcttcgctgtctaaggttgtcgaattttgtatggcattgggcggcaaaacaccaattcacagtgtattagttgcgaacaatggaatggcagcagctaagttcatgcggagtgtccgaacatgggctaatgaaacatttgggtcagagaaggcaattcagttgatagctatggctactccagaagacatgaggataaatgcagagcacattagaattgctgatcaatttgttgaagtacccggtggaacaaacaataacaactatgcaaatgtccaactcatagtggaggttagtattgctcacccgttgatgtgcaattgatgcgcaagttgttcatttagcatgacatgacaattttgctgttgcagatagcagtgagaaccggtgtttctgctgtttggcctggttggggccatgcatctgagaatcctgaacttccagatgcactaaatgcaaacggaattgtttttcttgggccaccatcatcatcaatgaacgcactaggtgacaaggttggttcagctctcattgctcaagcagcaggggttccgactcttccttggagtggatcacaggtgaatctcacattctctgataactcatcgtctgatctttgtactggacacattttataacagaaagacactatattataggtggaaattccattagaagtttgtttggactcgatacctgcggagatgtataggaaagcttgtgttagtactacggaggaagcacttgcgagttgtcagatgattgggtatccagccatgattaaagcatcatggggtggtggtggtaaagggatccgaaaggtacatcattcatttgattggactatattcaaaagattgtgtgggttgttgtgtgatattttatgcccagagttagctctaaccttttcaacatattaactcaatatctgttgcaggttaataacgacgatgatgtcagagcactgtttaagcaagtgcaaggtgaagttcctggctccccaatatttatcatgagacttgcatctcaggttagacttctctgcaagttgcattttttccaagcatgttgttcccgagttgtatattatacgcctggaagcttcatatgttattccttgcaggctagaaatgtatgctggaacatgtgctcatatggtatattatgttttaatcctccccttttttcttttgtagagtcgacatcttgaagttcagttgctttgtgatcaatatggcaatgtagctgcgcttcacagtcgtgactgcagtgtgcaacggcgacaccaaaaggtaacgctggtccagatctgaaaacatcacgtgtattacatgttctacttcatacttgtagttgtttatcaaaaggaccaattgcgtccattttttgtttataccagattattgaggaaggaccagttactgttgctcctcgcgagacagtgaaagagctagagcaagcagcaaggaggcttgctaaggctgtgggttatgttggtgctgctactgttgaatatctctacagcatggagactggtgaatactattttctggaacttaatccacggttgcaggtatattcttttgaacattcctctggacttagttttttgtcgtcagttatttacattgttaaatggcatacatccaggttgagcatccagtcaccgagtggatagctgaagtaaacttgcctgcagctcaagttgcagttggaatgggtatacccctttggcaggttccaggtaataattatattattgtaagttttttagttactttcccatgttatttctgtgcctaactttctccttatacagagatcagacgtttctatggaatggacaatggaggaggctatgacatttggaggaaaacagcagctcttgctaccccatttaactttgatgaagtggattctcaatggccaaagggtcattgtgtagcagttaggataaccagtgaggatccagatgacggattcaagcctaccggtggaaaagtaaaggtgagatttcatgatgccgtctatggttctagcacattagatttgtaaactgaccggatcttgattttcttataattcaggagatcagttttaaaagcaagccaaatgtttgggcctatttctctgttaaggtaagctgttcatggctctgttgcactgttatattgttgagttgggcagaaaattgggctgcgttttttttgaactattttttccatttgggctttgaccaagtactaaccaaatcgaacacatttttgtccccccttttatctgttttcagtccggtggaggcattcatgaatttgctgattctcagtttggtatgcaaaatttgaccctgtgtatattcctctttgctatttgtattggtccttacgtttggaagattactcttttcattacaggacatgtttttgcatatggagtgtctagagcagcagcaataaccaacatgtctcttgcgctaaaagagattcaaattcgtggagaaattcattcaaatgttgattacacagttgatctcttgaatgtaagaaataccacctgtatatgcttttgatgtaatacaaccattttacatctggcattcctttaaagtaatcccatgcctcaattttctgtatctttaaatcaggcctcagacttcaaagaaaacaggattcatactggctggctggataacagaatagcaatgcgagtccaagctgagagacctccgtggtatatttcagtggttggaggagctctatatgtaagaaactatgcccctcttactgcagcttttgtcaaaccaattgcgaaaaacacaattagttgtttaatgcaaatcactgtcttgtgctgcagaaaacaataacgagcaacacagacactgtttctgaatatgttagctatctcgtcaagggtcagattccaccgaaggtagtgttttaatgggcttaaactctggatattgcttgaagatgaatgttgttgaatgttgaacaatttcttttgtgcagcatatatcccttgtccattcaactgtttctttgaatatagaggaaagcaaatatacagtaagtcttacattcctttaaaaaaatgagtcgttgtaatgaagtaacggctatcgttgacgctcatctacaccatgtcacagattgaaactataaggagcggacagggtagctacagattgcgaatgaatggatcagttattgaagcaaatgtccaaacattatgtgatggtggacttttaatgcaggtgattttgtcttgtttttctacctgcccataagtatgatatataatgttgtgaagtactggtgaaagagttctgattcagtagctgtaatttcttcagttggatggaaacagccatgtaatttatgctgaagaagaggccggtggtacacggcttctaattgatggaaagacatgcttgttacaggtaataattgtctgtttgttcctttccttctaactaatcttggtgtttgatttgatattttccagccctatttgtggctttttacgtcattcgcttcattagcattcatttctttccactttcatttaaagaaatttaattacgatgtttatttctagtcatgtgccataagaaaccacaattaagtcattattatggactaattgatgtcacaacaagctgctattgtggtaaatccgtaaatgtgactacctaagcagccaaacaaaccaggtcataatgataagcgttatcaacggcatgtcttgtgaagttgtgatgtaaagacaagttacatagctgtaaaaaaattaatagggctccagtttttatattgctacttctgtttcttaatttgagcaactaccgaccacaatgctttgtgtttattacaaatttacaatcaagaatttattataatcaagctgtaataacctatgtcatgaaccttctagggcatgatgttacagcatcaattttttggtgataaaaaaggaactattaataattaatgattcttgatcatgccacattgtatcctcgtgtaaataaatgacacatcgttcttgcagaatgatcacgatccttcaaggttattagctgagacaccctgcaaacttcttcgtttcttggttgccgatggtgctcatgttgaagctgatgtaccatatgcggaagttgaggttatgaagatgtgcatgcccctcttgtcacctgctgctggtgtcattaatgttttgttgtctgagggccagcctatgcaggttacatcacaacgtttctattgcttctgctgtacataacaattgcacgtaaagtatctgaacttaatatattttgtctaggctggtgatcttatagcaagacttgatcttgatgacccttctgctgtgaagagagctgagccatttaacggatctttcccagaaatgagccttcctattgctgcttctggccaagttcacaaaagatgtgccacaagcttgaatgctgctcggatggtccttgcaggatatgatcacccgatcaacaaagtaaacatcaagaaccttgcagtacctatatttctggttttttgtcacgtgtttcttgttctcctcaaacaccttttttttatgttatgaattctggatgatccctaattcctccttgactttggctcccttatgctacaaaactgtttgtaacctatggaagtttattatgcctgtcttggaaaatctgaatttgggtgctctttctcttatgttaatcatggtcactactttacagattgtttttatccttgtgctatttttctctctttcagcaatttatgttttggtttgattttttccgatcataactatttgttcagcatttgtttacctttttcattatacccggctttcttttcaggttgtacaagatctggtatcctgtctagatgctcctgagcttcctttcctacaatgggaagagcttatgtctgttttagcaactagacttccaaggcttcttaagagcgaggtatgtgataatagacgtgatatgtagcgtctgggtagatttcaatctgccatgtggatttctaattggtgatatagaagggttgtatcactttgcataagcatcatgtcactttatcttgttaattttcattttacattgtccaatcaccggtaattttccgtagcttattgtgtaacttctaaaactgccttttcctaataatgtaatcaaaacttgaaatatttcattttaattcttcttagcttggaacatttgatacttcatctcatcaatttgcactgtagctcagaagttctcatttgattttaacccagttcttgcttattgatctttatattttttttgtgtgttctaccataatggtttcaactttttatgcaaccagttggagggtaaatacagtgaatataagttaaatgttggccatgggaagagcaaggatttcccttccaagatgctaagagagataatcgaggtcagtattaggtttcttttatgatatccttgtctagaacttctactgctctttgtaacatgttttcttgtaggaaaatcttgcacatggttctgagaaggaaattgctacaaatgagaggcttgttgagcctcttatgagcctactgaagtcatatgagggtggcagagaaagccatgcacactttattgtgaagtcccttttcgaggactatctctcggttgaggaactattcagtgatggcattcaggttatctgacatctcaaaactcagatctactagatatcattgttttaaaaggatattcctttttcccttttatttacgagaacattatcaactaatgttcatgcacatattatagtttgcaccataatctatcagtaattaagtagctaatgattttaggtgtaaaaaaggtagcaaatagtttgcaaatggcttatgtcttgtttccttagaaacgctttctgcttatttgtttccttcaactgtcatgttttgtagtctgatgtgattgaacgcctgcgccaacaacatagtaaagatctccagaaggttgtagacattgtgttgtctcaccaggtaaatgttttgtgatctgatggcttagtgcaaatgattactgaagcagtcttcattacttataattcgattttgttgtagggtgtgagaaacaaaactaagctgatactaacactcatggagaaactggtctatccaaaccctgctgcctacaaggatcagttgactcgcttttcctccctcaatcacaaaagatattataaggtgacaatggcagcctaaaataatggaagcttttgaatcatacttttctgatatcttagtctaatgaattacttacatcataataaatgcagttggcccttaaagctagcgagcttcttgaacaaaccaagcttagtgagctccgcacaagcattgcaaggagcctttcagaacttgagatgtttactgaagaaaggacggccattagtgagatcatgggagatttagtgactgccccactgccagttgaagatgcactggtttctttgtttgattgtagtgatcaaactcttcagcagagggtgatcgagacgtacatatctcgattataccaggtattacataaaatcattttttggacttgattgtactctccctttgcatttcttggaagcatacactaaagttcctattgaaacaagatgcttatgcttctttaaaataaatctggcagaatctaggtgtggaaatatttgattttactacatcttactgctcttcaagttggctaataccaaaaacattttcagcctcatcttgtcaaggatagtatccagctgaaatatcaggaatctggtgttattgctttatgggaattcgctgaagcgcattcagagaagagattgggtgctatggttattgtgaagtcgttagaatctgtatcagcagcaattggagctgcactaaagggtacatcacgctatgcaagctctgagggtaacataatgcatattgctttattgggtgctgataatcaaatgcatggaactgaagacaggtatgttcatgtgcaatattagtgctaatgagctgtatctggttgttaatatttggtggaataattcatttaataatttaactcattcctttcagtggtgataacgatcaagctcaagtcaggatagacaaactttctgcgacactggaacaaaatactgtcacagctgatctccgtgctgctggtgtgaaggttattagttgcattgttcaaagggatggagcactcatgcctatgcgccataccttcctcttgtcggatgaaaagctttgttatgaggaagagccggttctccggcatgtggagcctcctctttctgctcttcttgagttggtatgtgactatcaaaatgcctgcgtgttgtttgatactccatagtccatatgctttaattatcctgtttgctatttgtatttatttagcctgttgtggttacagggtaagttgaaagtgaaaggatacaatgaggtgaagtatacaccgtcacgtgatcgtcagtggaacatatacacacttagaaatacagagaaccccaaaatgttgcacagggtgtttttccgaactcttgtcaggcaacccggtgcttccaacaaattcacatcaggcaacatcagtgatgttgaagtgggaggagctgaggaatctctttcatttacatcgagcagcatattaagatcgctgatgactgctatagaagagttggagcttcacgcgattaggacaggtcactctcatatgtttttgtgcatattgaaagagcaaaagcttcttgatcttgttcccgtttcagggtaagcctgcacactgttcatttggtggcacataataggtcttgctcttgtgttttgccttcaatgaacttttcatcttactcaggaacaaagttgtggatattggccaagatgaagctactgcatgcttgcttctgaaagaaatggctctacagatacatgaacttgtgggtgcaaggatgcatcatctttctgtatgccaatgggaggtgaaacttaagttggacagcgatgggcctgccagtggtacctggagagttgtaacaaccaatgttactagtcacacctgcactgtggatgtaagttccttccccttgcatcttgtttttctgtgtgtaaccaatcagactaaattgaacttgtagcatttattcatagaactattatgtcatttagttgtcatttccacctaattatgtttggaagctcattctgtttttaatgcttttagatctaccgtgaggtcgaagatacagaatcacagaaactagtgtaccactctgctccatcgtcatctggtcctttgcatggcgttgcactgaatactccatatcagcctttgagtgttattgatctgaaacgttgctccgctagaaataacagaactacatactgctatgattttccgttggtgagtatctcgctctctttctctatatatgtatctattgtgttagcagattcttagtgatattatgtgtccaaaagctgacaagaactcaaaaatgtaggcatttgaaactgcagtgcagaagtcatggtctaacatttctagtgacactaaccgatgttatgttaaagcgacggagctggtgtttgctcacaagaacgggtcatggggcactcctgtaattcctatggagcgtcctgctgggctcaatgacattggtatggtagcttggatcttggacatgtccactcctgaatatcccaatggcaggcagattgttgtcatcgcaaatgatattacttttagagctggatcgtttggtccaagggaagatgcattttttgaaactgttaccaacctagcttgtgagaggaagcttcctctcatctacttggcagcaaactctggtgctcggatcggcatagcagatgaagtaaaatcttgcttccgtgttggatggtctgatgatggcagccctgaacgtgggtttcaatatatttatctgactgaagaagaccatgctcgtattagcgcttctgttatagcgcacaagatgcagcttgataatggtgaaattaggtgggttattgattctgttgtagggaaggaggatgggctaggtgtggagaacatacatggaagtgctgctattgccagtgcctattctagggcctatgaggagacatttacgcttacatttgtgactggaaggactgttggaataggagcatatcttgctcgacttggcatacggtgcattcagcgtactgaccagcccattatcctaactgggttttctgccttgaacaagcttcttggccgggaagtgtacagctcccacatgcagttgggtggccccaaaattatggccacaaacggtgttgtccatctgacagtttcagatgaccttgaaggtgtatctaatatattgaggtggctcagctatgttcctgccaacattggtggacctcttcctattacaaaatctttggacccacctgacagacccgttgcttacatccctgagaatacatgtgatcctcgtgcagccatcagtggcattgatgatagccaagggaaatggttggggggcatgttcgacaaagacagttttgtggagacatttgaaggatgggcgaagtcagtagttactggcagagcgaaactcggagggattccggtgggtgttatagctgtggagacacagactatgatgcagctcatccctgctgatccaggtcagcttgattcccatgagcggtctgttcctcgtgctgggcaagtctggtttccagattcagctactaagacagcgcaggcaatgctggacttcaaccgtgaaggattacctctgttcatccttgctaactggagaggcttctctggtgggcaaagagatctttttgaaggaatccttcaggctgggtcaacaattgttgagaaccttaggacatacaatcagcctgcctttgtatatatccccaaggctgcagagctacgtggaggggcttgggtcgtgattgatagcaagataaatccagatcgcattgagttctatgctgagaggactgcaaagggcaatgttcttgaacctcaagggttgattgagatcaagttcaggtcagaggaactccaagagtgcatgggcaggcttgacccagaattgataaatttgaaggcaaaactcctgggagcaaagcatgaaaatggaagtctatctgagtcagaatcccttcagaagagcatagaagcccggaagaaacagttgttgcctttgtatactcaaattgcggtacggttcgctgaattgcatgacacttcccttagaatggctgctaagggtgtgattaagaaggttgtagactgggaagattctaggtctttcttctacaagagattacggaggaggatatccgaggatgttcttgcaaaggaaattagaggtgtaagtggcaagcagttttctcaccaatcggcaatcgagctgatccagaaatggtacttggcctctaagggagctgaaacaggaaacactgaatgggatgatgacgatgcttttgttgcctggagggaaaaccctgaaaactaccaggagtatatcaaagaactcagggctcaaagggtatctcagttgctctcagatgttgcagactccagtccagatctagaagccttgccacagggtctttctatgctactagagaaggtacgcatacttgctgttttatttcttgaaagtaatttattgaggttgagtgaaatgttgccatcttatgtatatatagtgttttaacaaataatgataatgctttttctttggtcactcacttgttcagatggatccctcaaggagagcacagtttgttgaggaagtcaagaaggtccttaaatga

SEQ ID NO: 958 - protein, 2311 aa, Triticum aestivum
MGSTHLPIVGLNASTTPSLSTIRPVNSAGAAFQPSAPSRTSKKKSRRVQSLRDGGDGGVSDPNQSIRQGLAGIIDLPKEGTSAPEVDISHGSEEPRGSYQMNGILNEAHNGRHASLSKVVEFCMALGGKTPIHSVLVANNGMAAAKFMRSVRTWANETFGSEKAIQLIAMATPEDMRINAEHIRIADQFVEVPGGTNNNNYANVQLIVEIAVRTGVSAVWPGWGHASENPELPDALNANGIVFLGPPSSSMNALGDKVGSALIAQAAGVPTLPWSGSQVEIPLEVCLDSIPAEMYRKACVSTTEEALASCQMIGYPAMIKASWGGGGKGIRKVNNDDDVRALFKQVQGEVPGSPIFIMRLASQSRHLEVQLLCDQYGNVAALHSRDCSVQRRHQKIIEEGPVTVAPRETVKELEQAARRLAKAVGYVGAATVEYLYSMETGEYYFLELNPRLQVEHPVTEWIAEVNLPAAQVAVGMGIPLWQVPEIRRFYGMDNGGGYDIWRKTAALATPFNFDEVDSQWPKGHCVAVRITSEDPDDGFKPTGGKVKEISFKSKPNVWAYFSVKSGGGIHEFADSQFGHVFAYGVSRAAAITNMSLALKEIQIRGEIHSNVDYTVDLLNASDFKENRIHTGWLDNRIAMRVQAERPPWYISVVGGALYKTITSNTDTVSEYVSYLVKGQIPPKHISLVHSTVSLNIEESKYTIETIRSGQGSYRLRMNGSVIEANVQTLCDGGLLMQLDGNSHVIYAEEEAGGTRLLIDGKTCLLQNDHDPSRLLAETPCKLLRFLVADGAHVEADVPYAEVEVMKMCMPLLSPAAGVINVLLSEGQPMQAGDLIARLDLDDPSAVKRAEPFNGSFPEMSLPIAASGQVHKRCATSLNAARMVLAGYDHPINKVVQDLVSCLDAPELPFLQWEELMSVLATRLPRLLKSELEGKYSEYKLNVGHGKSKDFPSKMLREIIEENLAHGSEKEIATNERLVEPLMSLLKSYEGGRESHAHFIVKSLFEDYLSVEELFSDGIQSDVIERLRQQHSKDLQKVVDIVLSHQGVRNKTKLILTLMEKLVYPNPAAYKDQLTRFSSLNHKRYYKLALKASELLEQTKLSELRTSIARSLSELEMFTEERTAISEIMGDLVTAPLPVEDALVSLFDCSDQTLQQRVIETYISRLYQPHLVKDSIQLKYQESGVIALWEFAEAHSEKRLGAMVIVKSLESVSAAIGAALKGTSRYASSEGNIMHIALLGADNQMHGTEDSGDNDQAQVRIDKLSATLEQNTVTADLRAAGVKVISCIVQRDGALMPMRHTFLLSDEKLCYEEEPVLRHVEPPLSALLELGKLKVKGYNEVKYTPSRDRQWNIYTLRNTENPKMLHRVFFRTLVRQPGASNKFTSGNISDVEVGGAEESLSFTSSSILRSLMTAIEELELHAIRTGHSHMFLCILKEQKLLDLVPVSGNKVVDIGQDEATACLLLKEMALQIHELVGARMHHLSVCQWEVKLKLDSDGPASGTWRVVTTNVTSHTCTVDIYREVEDTESQKLVYHSAPSSSGPLHGVALNTPYQPLSVIDLKRCSARNNRTTYCYDFPLAFETAVQKSWSNISSDTNRCYVKATELVFAHKNGSWGTPVIPMERPAGLNDIGMVAWILDMSTPEYPNGRQIVVIANDITFRAGSFGPREDAFFETVTNLACERKLPLIYLAANSGARIGIADEVKSCFRVGWSDDGSPERGFQYIYLTEEDHARISASVIAHKMQLDNGEIRWVIDSVVGKEDGLGVENIHGSAAIASAYSRAYEETFTLTFVTGRTVGIGAYLARLGIRCIQRTDQPIILTGFSALNKLLGREVYSSHMQLGGPKIMATNGVVHLTVSDDLEGVSNILRWLSYVPANIGGPLPITKSLDPPDRPVAYIPENTCDPRAAISGIDDSQGKWLGGMFDKDSFVETFEGWAKSVVTGRAKLGGIPVGVIAVETQTMMQLIPADPGQLDSHERSVPRAGQVWFPDSATKTAQAMLDFNREGLPLFILANWRGFSGGQRDLFEGILQAGSTIVENLRTYNQPAFVYIPKAAELRGGAWVVIDSKINPDRIEFYAERTAKGNVLEPQGLIEIKFRSEELQECMGRLDPELINLKAKLLGAKHENGSLSESESLQKSIEARKKQLLPLYTQIAVRFAELHDTSLRMAAKGVIKKVVDWEDSRSFFYKRLRRRISEDVLAKEIRGVSGKQFSHQSAIELIQKWYLASKGAETGNTEWDDDDAFVAWRENPENYQEYIKELRAQRVSQLLSDVADSSPDLEALPQGLSMLLEKMDPSRRAQFVEEVKKVLK

SEQ ID NO: 959 - DNA, 12173 bp, Triticum aestivum
  source 1..12173: mol_type = genomic DNA
atgggatccacacatttgcccattgtcggctttaatgcctcgacgacaccatcactatccactattcgcccggtaaattcagccggtgctgcattccaaccatctgccccttctagaacatccaagaagaaaagtcgtcgtgttcagtcattaagggatggaggcgatggaggcgtgtcagaccctaaccagtctattcgccaaggtaacctgaaaaccatttcctttctacaaactacactttgtttccatcctcaaacttttgtagatacttttattgacttgagagcatgttagttttagtgtaagatatctcaatgctagatcacagaatggcggttattgaccttgttaaaagatgcaaatgactgcagcaatatttaacaatttttttatgtgatacgatagtactttttctataacgagtaatgagtgaagcccagtttttcttgattaaatggttttagtggaaggaatgtttaatattcaaaatgatgttttataagggaaaggaacatgaaagtgtaagaatacatataagcagcatattagttatgtatgactgagtcagtttccttatataatacttctaaaagagaagaatgtctagaaaccttttctgataatttactagcatgaagaacaataacattcgtaaagttgtcacctgtgcttcttcttagctatcgtgtaaacttgctcagtttctaatgcgtatctggatgtaggtcttgccggcatcattgacctcccaaaggagggcacatcagctccggaagtggatatttcacagtaagtacttgagcattttaaaattagaattagcaatctctctttaaaatggaaaaataactataatttaatatagaagtattatagattatgcttattttattattcgcatatgctgatattttgaattgcatttgatgtgtttttatagatttttactgaactacattatagttgccatacacaatgcatttgctcaggcacatcactgttgcactgcatggagtatttttgtgcacttaggaatcatttttcagaaagccttttgcctataattttaaaaataataatttaattaccatctgaaacccgtacccacatgacggatggaagctcatttgaagttttcgattatagtagccaagtatttgttatgttatattgttatggtcaccatcgtaatgattttgttcttttttctctagtgggtccgaagaacccagaggctcctaccaaatgaatgggatactgaatgaagcacataatgggaggcatgcttcgctgtctaaggttgtcgaattttgtgtggcattgggcggcaaaacaccaattcacagtgtattagttgcgaacaatggaatggcagcagctaagttcatgcgaagtgtccgaacatgggctaatgaaacatttgggtcagagaaggcaattcagttgatagctatggctactccagaagacatgaggataaatgcagagcacattagaattgctgatcaatttgttgaagtacccggtggaacaaacaataacaactatgcaaatgtccaactcatagtggaggttagtattgctcatccgttgatgtgcaatcgatgcgcaagttgttcatttagcatggcatgacaattttgctgttgcagatagcagtgagaaccggtgtttctgctgtttggcctggttggggccatgcatctgagaatcctgaacttccagatgcactaaatgcaaacggaattgtttttcttgggccaccatcatcatcaatgaacgcactaggtgacaaggttggttcagctctcattgctcaagcagcaggggttccgactcttccttggagtggatcacaggtgaacctcacattctctgataacttatcgtctgatcttgtactggacacattttataaccgaaggacactatattataggtggaaattccattagaagtttgtttggactcgatacccgcggagatgtataggaaagcttgtgttagtactacggaggaagcacttgcgagttgtcagatgattgggtatcccgccatgattaaagcatcatggggtggtggtggtaaagggatccgaaaggtacatcattcatttgattggactatattcaaacgattgtgtgggttgttgtgatattttatgcccagagttagctctaaccttttcaacatattaactcaatatctgttgcaggttaataatgacgatgatgtcagagcactgtttaagcaagtgcaaggtgaagttcctggctccccaatatttatcatgagacttgcatctcaggttagacttctctgcaagttgcattttttccaagcatgttgttcccgagttgtatattatacgcctgtaagcttcatatgttattccttgcaggctagaaatgtatgctggaacatgtgctcatatggtatattatgttcctttttcttttgtagagtcgacatcttgaagttcagttgctttgtgatcaatatggcaatgtagctgcgcttcacagtcgtgactgcagtgtgcaacggcgacaccaaaaggtaacgctggtccagatctgaaaacatcacgtgtattacatgttctacttcatacttgtagttgtttatcaaaaggaccaattgcgtccattttttgtttataccagattattgaggaaggaccagttactgttgctcctcgcgagacagtgaaagagctagagcaagcagcaaggaggcttgctaaggctgtgggttatgttggtgctgctactgttgaatatctctacagcatggagactggtgaatactattttctggaacttaatccacggttgcaggtatattcttttgaacattcctctggacttaattttttgtcgtcagttatttacattgttaaatggcatacatccaggttgagcatccagtcaccgagtggatagctgaagtaaacttgcctgcagctcaagttgcagttggaatgggtatacccctttggcaggttccaggtaataattatattattgtaagttttttagttactttcccatgttatttctgtgcctaaatttctccttatacagagatcagacgtttctatggaatggacaatggaggaggctatgacatttggaggaaaacagcagctcttgctactccatttaacttcgatgaagtggattctcaatggccaaagggtcattgtgtagcagttaggataaccagtgaggatccagatgacggattcaagcctaccggtggaaaagtaaaggtgagatttcatgatgccgtctatggttctagcacattagatttgtaaactaaccggatcttgattttcttataattcaggagatcagttttaaaagcaagccaaatgtttgggcttatttctctgttaaggtaagctgttcatggctctgttgcactgttatattgttgagttgggcaggaaattgggctgcgttttttttgagctagtttttccatttgggctttgaccaagtattaaccaaatcgaacacatttttgtccccccttttatctgttttcagtccggtggaggcattcatgaatttgctgattctcagtttggtatgcaaaatttgaccctgtgaatattcctctttgctatttgtattggtccttacgtttggaagattactcttttcattacaggacatgtttttgcatatggagtgtctagagcagcagcaataaccaacatgtctcttgcgctaaaagagattcaaattcgtggagaaattcattcaaatgttgattacacagttgatctcttgaatgtaagaaataacacctgtatattgaatccctgcttttgatgtaatacaaccattttacatctggcattcctttaaagtaatcccatgcctcaattttctgtatattttaatcaggcctcagacttcaaagaaaacaggattcatactggctggctggataacagaatagcaatgcgagtccaagctgagagacctccctggtatatttcagtggttggaggagctctatatgtaagaaactatgcccctcttactgcagcttttgtcaaaccaattgcgaaaaacacaattagttgtttaatgcaaatcactgtcttgtgctgcagaaaacaataacaagcaacacagacactgtttctgaatatgttagctatctcgtcaagggtcagattccaccaaaggtagtgttttaatgggcttaaactctgggtattgcttgaagatgaatgttgttgaatgttgaccaatttcttttgtgcagcatatatcccttgtccattcaactgtttctttgaatatagaggaaagcaaatatacagtaagtcttacattcctctaaaagtgagtcgttgtaatgaagtaacagctatcgttgacgctcatctacatcatgtcacagattgaaactataaggagcggacagggtagctacagattgcgaatgaatggatcagttattgaagcaaatgtccaaacattatgtgatggtggacttttaatgcaggtgattttgtcttgtttttatacctgcccataagtatgatatataatgtggtgaagtactggtgaaagagttctgattcagtagctgtaatttcttcagttggatggaaacagccatgtaatttatgctgaagaagaggccggtggtacacggcttctaattgatggaaagacatgcttgttacaggtaataattgtctgtttgttcctttccttctaactaatcttggtgtttgatttgatattttccagccctatttgtggctttttacgtcattcgcttcattagcattcatttctttccactttcatttaaagatatttaattacgatgtttatttttagtcatgtgccataagaaaccacaattaagtcattattatggactaattgatgtcacaacaagctgctattgtggtaaatgcgactacctaagcagccaaacaaaccaggtaataatgataagcgttatcaacgacatgtcttgtgaagttgtgatgtaaagacaagttacatagctgtaaaaaatttaatagggctccagtttttatattgctacttctgtttcttaatttgagcaactgccgaccacaatgctttgtgtttattacaaatttacaatcaagaatttattataatcaagctgtaataaactatgtcatgaaccttctaaggcatcatgttaccgcatcaattttttggtgataaaaaagaactattaataattaatgattcttgatcatgccacattgtatcctcgtgtaaataaatgacacatcgttcttgcagaatgatcacgatccttcaaggttattagctgagacaccctgcaaacttcttcgtttcttggttgccgatggtgctcatgttgaagctgatgtaccatatgcggaagttgaggttatgaagatgtgcatgcccctcttgtcacctgctgctggtgtcattaatgttttgttgtctgagggccagcctatgcaggttacatcacaacgtttccattgcttctgctgtacataacaattgcacgtaaagtatctgaacttaatatattttgtctaggctggtgatcttatagcaagacttgatcttgatgacccttctgctgtgaagagagctgagccatttaacggatctttcccagaaatgagccttcccattgctgcttctggccaagttcacaaaagatgtgccacaagcttgaatgctgctcggatggtccttgcaggatatgatcacccgatcaacaaagtaaacatcaagaaccttgcagtacctatatttctgtttttttgtcatgtgtttcttgttctcctcaaacacctttttttttatgttacgaattctggattatccctaattcctccttgactttggctcccttatgctacaaaactgtttgtaacctatggaagtttattatgcctgtcttggaaaatctgaatttgggtgctctttctcttatgttaatcatggtcactacttactttacagattgtttttatccttgtgctatttttctctctttcagcaatttatgttttggtttgatttttaaagatcatacctatttgttcagcatttgtttacctttttcattatacccggctttcttttcaggttgtacaagatctggtatcctgtctagatgctcctgagcttcctttcctacaatgggaagagcttatgtctgttttagcaaccagacttccaaggcttcttaagagcgaggtatgtgataatagacgtgatatgtagcgtctgggtagatttcaatctgccatgtggatttctaattggtgatatagaagggttgtatcactttgcataagcatcatgtcactatatcttattaattttcattttacattgtccaatcaccggtaattttccgtagcttattgtgtaacttctaaaattgccttttcctaataatgtaatcaaaacttgaaatatttcattttaattcttcttagcttggaacatttgatacttcatctcatcaatttgcactgcagctcagaagttctcatttgattttaacccagttcttgcttattgatcttcatttttttttgtgtgatctaccataacggtttcaactttttatgcaaccagttggagggtaaatacagtgaatataagttaaatgttggccatgggaagagcaaggatttcccttccaagatgctaagagagataatcgaggtcagcattaggtttcttttatgatatccttgtctagaacttctactgctctttgtaacatgttttcttgtaggaaaatcttgcacatggttctgagaaggaaattgctacaaatgagaggcttgttgagcctcttatgagcctactgaagtcatatgagggtggcagagaaagccatgcacactttattgtgaagtcccttttcgaggactatctctcggttgaggaactattcagtgatggcattcaggttatctgacattccaaaactcagatctactagatatcattgttttaaaaggatattcctttttcccttttatttacaagaacattatcaactaatgttcatgcacatattatagtttgcaccagaatctatcagtaattaagtagctaatgtttttaggtgtaaaaaaggtagcaaatagtttgcatatggcttatgtcttgtttccttagaaacgctttctgcttatttgtttccttcaactgtcatgttttgtagtctgatgtgattgaacgcctgcgccaacaacatagtaaagatctccagaaggttgtagacattgtgttgtctcaccaggtaaatgttttgtgatctgatggcttagtgcaaatgattactgaagcagtcttcattacttacaattcgattttgttgtagggtgtgagaaacaaaactaagctgatactaacactcatggagaaactggtctatccaaaccctgctgcctacaaggatcagttgactcgcttttcttccctcaatcacaaaagatattataaggtgacaatggcaacctaaaataatggaagctttcgaatcatacttttctgatatcttagtctaatgaattacttacatcttaataaatgcagttggcccttaaagctagcgagcttcttgaacaaaccaagcttagtgagctccgcacaagcattgcaaggagcctttcagaacttgagatgtttactgaagaaaggacggccattagtgagatcatgggagatttagtgactgccccactgccagttgaagatgcactggtttctttgtttgattgtagtgatcaaactcttcagcagagggtgatcgagacgtacatatctcgattataccaggtattacataaaatcattttttggacttgatcatgctctccctttgcatttctaggaatcatacactaaagttcctattgaaacaagatgcttatgcttctttaaaataaatctggcagaatctaggtgtggacatatttgattttactacatcttactgctcttcaagttggctaacaccaaaaacattttcagcctcatcttgtcaaggatagtatccagctgaaatatcaggaatctggtgttattgctttatgggaattcgctgaagcgcattcagagaagagattgggtgctatggttattgtgaagtcgttagaatctgtatcagcagcaattggagctgcactaaaggatacatcacgctatgcaagctctgagggtaacataatgcatattgctttattgggtgctgataatcaaatgcatggaactgaagacaggtatgttcatgtgcaatattagtgctaatgagctgtatctggttgttaatatttggtggaataattcctttaataattaactcattcctttcagtggtgataacgatcaagctcaagtcaggatagacaaactttctgcgacactggaacaaaatactgtcacagctgatctccgtgctgctggtgtgaaggttattagttgcattgttcaaagggatggagcactcatgcctatgcgccataccttcctcttgtcggatgaaaagctttgttatgaggaagagccggttctccggcatgtggagcctcctctttctgctcttcttgagttggtatgtgactatcaaaatgcctgcgtgttgtttgatacactccataactccatagtccatatgctttaattatcctgtttgctatttgtatttatttagcctgttgtggttacagggtaagttgaaagtgaaaggatacaatgaggtgaagtatacaccgtcacgtgatcgtcagtggaacatatacacacttagaaatacagaaaaccccaaaatgttgcacagggtgtttttccgaactcttgtcaggcaacccggtgcttccaacaaattcacatcaggccacatcagtgatgttgaagtgggaggagctgaggaatctctttcatttacatcgagcagcatattaagatcgctgatgactgctatagaagagttggagcttcacgcgattcggacaggtcactctcatatgtttttgtgcatattgaaagagcaaaagcttcttgatcttgttcctgtttcagggtaagcctgcacactcttcatttggtggcacataataggtcttgctcttgtgttttgccttcaatgaacttttcatcttactcaggaacacagttgtggatattggccaagatgaagctactgcatgctcgcttctgaaagaaatggctctacagatacatgaacttgtgggtgcaaggatgcatcatctttctgtatgccaatgggaggtgaaacttaagttggacagcgatgggcctgcgagtggtacctggagagttgtaacaaccaatgttactagtcacacctgcactgtggatgtaagttccttccccttgcatcttgttttttctgtgtgtaaccaatcaaactaaattgagcttgtagcatttattcatagaactattgtgatcatttagttgtcatttccacctaattatgtttggaagctcattgtgtttttaatgcttttagatctaccgtgaggttgaagatacagaatcacagaaactagtataccactctgctccatcgtcatctggtcctttgcatggcgttgcactgaatactccatatcagcctttgagtgttattgatctgaaacgttgctccgctagaaacaacagaactacatactgctatgattttccgttggtgagtatctccctctctgtctctatacatgtatctattgtgttagcagattcttagtgatattatgtgtccaaaagctgacaagtactcaaaaatgtaggcatttgaaactgcagtgcagaagtcatggtctaacatttctagtgacaataaccgatgttatgttaaagcaacggagctggtgtttgctcacaagaatgggtcatggggcactcctgtaattcctatggagcgtcctgctgggctcaatgacattggtatggtagcttggatcttggacatgtccactcctgaatatcccaatggcaggcagattgttgtcatcgcaaatgatattacttttagagctggatcgtttggtccaagggaagatgcattttttgaaactgttaccaacctagcttgtgagaggaagcttcctctcatctacttggcagcaaactctggtgctcggatcggcatagcagatgaagtaaaatcttgcttccgtgttggatggtctgatgatggcagccctgaacgtgggtttcagtacatttatctgactgaagaagaccatgctcgtattagcacttctgttatagcgcacaagatgcagcttgataatggtgaaattaggtgggttatcgattctgttgtggggaaggaggatgggctaggtgtggagaacatacatggaagtgctgctattgccagtgcctattctagggcctatgaggagacatttacgcttacatttgtgactggacggactgttggaataggagcatatcttgctcgacttggcatacggtgcatacagcgtactgaccagcccattatcctaactgggttctctgccttgaacaagcttcttggccgggaagtttacagctcccacatgcagttgggtggccccaaaattatggcgacaaacggtgttgtccatctgacagtttcagatgaccttgaaggtgtatctaatatattgaggtggctcagctatgttcctgccaacattggtggacctcttcctattacaaaatctttggacccacctgacagacccgttgcttacatccctgagaatacatgcgatcctcgtgctgccatcagtggcattgatgatagccaagggaaatggttggggggcatgttcgacaaagacagttttgtggagacatttgaaggatgggcgaagtcagttgttactggcagagctaaactcggagggattccggtgggtgttatagctgtggagacacagactatgatgcagctcatccctgctgatccaggccagcttgattcccatgagcggtctgttcctcgtgctgggcaagtctggtttccagattcagctactaagacagcgcaggcaatgctggacttcaaccgtgaaggattacctctgttcatccttgctaactggagaggcttctctggtggacaaagagatctttttgaaggaatccttcaggctgggtcaacaattgttgagaaccttaggacatacaatcagcctgcctttgtatatatccccaaggctgcagagctacgtggaggggcttgggtcgtgattgatagcaagataaatccagatcgcattgagttctatgctgagaggactgcaaagggcaatgttctcgaacctcaagggttgatcgagatcaagttcaggtcagaggaactccaagagtgcatgggtaggcttgatccagaattgataaatctgaaggcaaagctccagggagtaaagcatgaaaatggaagtctacctgagtcagaatcccttcagaagagcatagaagcccggaagaaacagttgttgcctttgtatactcaaattgcggtacggttcgctgaattgcatgacacttcccttagaatggctgctaagggtgtgattaagaaggttgtagactgggaagattctaggtcgttcttctacaagagattacggaggaggatatccgaggatgttcttgcgaaggaaattagaggtgtaagtggcaagcagttttctcaccaatcggcaatcgagctgatccagaaatggtacttggcctctaagggagctgaaacaggaagcactgaatgggatgatgacgatgcttttgttgcctggagggaaaaccctgaaaactaccaggagtatatcaaagaactcagggctcaaagggtatctcagttgctctcagatgttgcagactccagtccagatctagaagccttgccacagggtctttctatgctactagagaaggtacacatacttactgttttatttcttgaaagtaatttattgaggttgagtgaaatgttgccatcttatgtatatatagtgtcttaacaaataatgataatgctttttctttggtcactcgcttgttcagatggatccctcaaggagagcacagtttgttgaggaagtcaagaaagtccttaaatga

SEQ ID NO: 960 - protein, 2311 aa, Triticum aestivum
MGSTHLPIVGFNASTTPSLSTIRPVNSAGAAFQPSAPSRTSKKKSRRVQSLRDGGDGGVSDPNQSIRQGLAGIIDLPKEGTSAPEVDISHGSEEPRGSYQMNGILNEAHNGRHASLSKVVEFCVALGGKTPIHSVLVANNGMAAAKFMRSVRTWANETFGSEKAIQLIAMATPEDMRINAEHIRIADQFVEVPGGTNNNNYANVQLIVEIAVRTGVSAVWPGWGHASENPELPDALNANGIVFLGPPSSSMNALGDKVGSALIAQAAGVPTLPWSGSQVEIPLEVCLDSIPAEMYRKACVSTTEEALASCQMIGYPAMIKASWGGGGKGIRKVNNDDDVRALFKQVQGEVPGSPIFIMRLASQSRHLEVQLLCDQYGNVAALHSRDCSVQRRHQKIIEEGPVTVAPRETVKELEQAARRLAKAVGYVGAATVEYLYSMETGEYYFLELNPRLQVEHPVTEWIAEVNLPAAQVAVGMGIPLWQVPEIRRFYGMDNGGGYDIWRKTAALATPFNFDEVDSQWPKGHCVAVRITSEDPDDGFKPTGGKVKEISFKSKPNVWAYFSVKSGGGIHEFADSQFGHVFAYGVSRAAAITNMSLALKEIQIRGEIHSNVDYTVDLLNASDFKENRIHTGWLDNRIAMRVQAERPPWYISVVGGALYKTITSNTDTVSEYVSYLVKGQIPPKHISLVHSTVSLNIEESKYTIETIRSGQGSYRLRMNGSVIEANVQTLCDGGLLMQLDGNSHVIYAEEEAGGTRLLIDGKTCLLQNDHDPSRLLAETPCKLLRFLVADGAHVEADVPYAEVEVMKMCMPLLSPAAGVINVLLSEGQPMQAGDLIARLDLDDPSAVKRAEPFNGSFPEMSLPIAASGQVHKRCATSLNAARMVLAGYDHPINKVVQDLVSCLDAPELPFLQWEELMSVLATRLPRLLKSELEGKYSEYKLNVGHGKSKDFPSKMLREIIEENLAHGSEKEIATNERLVEPLMSLLKSYEGGRESHAHFIVKSLFEDYLSVEELFSDGIQSDVIERLRQQHSKDLQKVVDIVLSHQGVRNKTKLILTLMEKLVYPNPAAYKDQLTRFSSLNHKRYYKLALKASELLEQTKLSELRTSIARSLSELEMFTEERTAISEIMGDLVTAPLPVEDALVSLFDCSDQTLQQRVIETYISRLYQPHLVKDSIQLKYQESGVIALWEFAEAHSEKRLGAMVIVKSLESVSAAIGAALKDTSRYASSEGNIMHIALLGADNQMHGTEDSGDNDQAQVRIDKLSATLEQNTVTADLRAAGVKVISCIVQRDGALMPMRHTFLLSDEKLCYEEEPVLRHVEPPLSALLELGKLKVKGYNEVKYTPSRDRQWNIYTLRNTENPKMLHRVFFRTLVRQPGASNKFTSGHISDVEVGGAEESLSFTSSSILRSLMTAIEELELHAIRTGHSHMFLCILKEQKLLDLVPVSGNTVVDIGQDEATACSLLKEMALQIHELVGARMHHLSVCQWEVKLKLDSDGPASGTWRVVTTNVTSHTCTVDIYREVEDTESQKLVYHSAPSSSGPLHGVALNTPYQPLSVIDLKRCSARNNRTTYCYDFPLAFETAVQKSWSNISSDNNRCYVKATELVFAHKNGSWGTPVIPMERPAGLNDIGMVAWILDMSTPEYPNGRQIVVIANDITFRAGSFGPREDAFFETVTNLACERKLPLIYLAANSGARIGIADEVKSCFRVGWSDDGSPERGFQYIYLTEEDHARISTSVIAHKMQLDNGEIRWVIDSVVGKEDGLGVENIHGSAAIASAYSRAYEETFTLTFVTGRTVGIGAYLARLGIRCIQRTDQPIILTGFSALNKLLGREVYSSHMQLGGPKIMATNGVVHLTVSDDLEGVSNILRWLSYVPANIGGPLPITKSLDPPDRPVAYIPENTCDPRAAISGIDDSQGKWLGGMFDKDSFVETFEGWAKSVVTGRAKLGGIPVGVIAVETQTMMQLIPADPGQLDSHERSVPRAGQVWFPDSATKTAQAMLDFNREGLPLFILANWRGFSGGQRDLFEGILQAGSTIVENLRTYNQPAFVYIPKAAELRGGAWVVIDSKINPDRIEFYAERTAKGNVLEPQGLIEIKFRSEELQECMGRLDPELINLKAKLQGVKHENGSLPESESLQKSIEARKKQLLPLYTQIAVRFAELHDTSLRMAAKGVIKKVVDWEDSRSFFYKRLRRRISEDVLAKEIRGVSGKQFSHQSAIELIQKWYLASKGAETGSTEWDDDDAFVAWRENPENYQEYIKELRAQRVSQLLSDVADSSPDLEALPQGLSMLLEKMDPSRRAQFVEEVKKVLK

SEQ ID NO: 961 - DNA, 12170 bp, Triticum aestivum
  source 1..12170: mol_type = genomic DNA
atgggatccacacatttgcccatcgtcggctttaatgcctcaacaacaccatcgctatccactattcgcccggtaaattcagctggtgctgcattccaaccatctgccccttctagaacctccaagaagaaaagtcgtcgtgttcagtcattaagggatggaggcgatggaggcgtgtcagaccctaaccagtctattcgccatggtaacaacctgaaaaccatttcctttctacaaactacactttgttgtcatcctcagacttgtgtagatacttttattgactgagagcatgttggttttagtgtaaggtatctcaatgctagatcacagaatggcggttattgacctcgttaaagatgcaaatgactgcagcaatatttaacaatttttttatgtgatacgatagtacttttttataacgagtaatgagtaaagcccagtttttcttgattaaatggttttagtggaaggaatgtttaatattcaaaatgatgttttataagggaaggaacatgaaagtgcaagaatacatataagcagcatattagttatgtatgactgagtcattttccttatataatacttctaaaagagaagaatgtctagaaaccttttctgataatttactagcatgaagaacaataacattcataaagttgtcacctgtgcttcttcttagctatcgtgtaaacttgctcagtttctaatgcatatctggatgtaggtcttgccggcatcattgacctcccaaaggagggcacatcagctccggaagtggatatttcacagtaagtactttagcattttaaaattagaattagcatctctctttaaaatggaaaaatatctataatttaatatagaattattatagattatgcttattttattattcgcacatgctgatattttgaattgcatttgatatatttttatagatttttactgaactactccctccataaactaatataagagcgtttagaacactattttagtgatctaaacactcttatattggtttacagagggagtacattatagttgccatacacaatgcatttgctcaggcacatcactgttgcactgcatggagtatttttgtgcacttcggaatcattttcagaaagccttttgcctataattttaataataataatttaattaccatctgaaacccgtacccacatgacggatgaaagctcatttgaagtttccgatttatagtagccaagtatttgttatgttatattgttatggtcaccatcgtaatgaatttgttcttttttctctagtgggtccgaagaacccaggggctcctaccaaatgaatgggatactgaatgaagcacataatgggaggcatgcttcgctgtctaaggttgttgaattttgtacggcattgggcggcaaaacaccaattcacagtgtattagttgcgaacaatggaatggcagcagctaagttcatgcggagtgtccgaacatgggctaatgaaacatttgggtcagagaaggcaattcagttgatagctatggctactccagaagacatgaggataaatgcagagcacattagaattgctgatcaatttgttgaagtacccggtggaacaaacaataacaactatgcaaatgtccaactcatagtggaggttagtattgctcatccgttgatgtgcaaccgatgcacaagttgttcatttagcatgacatgacaattttgctgttgcagatagcagtgagaaccggtgtttctgctgtttggcctggttggggccatgcatctgagaatcctgaacttccagatgcactaaatgcaaacggaattgtttttcttgggccaccatcatcatcaatgaacgcactaggtgacaaggttggttcagctctcattgctcaagcagcaggggttccgactcttccttggagtggatcacaggtgaatctcacattctctgataactcatcgtctgatctttgtactggacacatttaataaccgaaagacactatattataggtggaaattccattagaagtttgtttggactcgatacctgcggagatgtataggaaagcttgtgttagtactacagaggaagcacttgcgagttgtcagatgattgggtatcccgccatgattaaagcatcatggggtggtggtggtaaagggatccgaaaggtacatcattcatttgattggactatatttgaaagattgtgtgggttgttgtgtgatatattatgcccagagttagctctaaccttttcaacatattaactcaatatctgttgcaggttaataatgacgatgatgtcagagcactgtttaagcaagtgcaaggtgaagttcctggctccccaatatttatcatgagacttgcatctcaggttagacttctcagcaagttgcattttttccaagcatgttattcccgagttgtatattacacgcctggaagcttcatatgttattccttgcaggctagaaatgtatgctggaacatgtgctcatatggtatattatgttttaatcctccccttttttcttttgtagagtcgacatcttgaagttcagttgctttgtgatcaatatggcaatgtagctgcgcttcacagtcgtgactgcagtgtgcaacggcgacaccaaaaggtaacgctggtccagatctgaaaacatcacgtgtattgcatgttctacttcatacttgtagttgtttatcaaaaggaccaattgcgtccattttttgtttataccagattattgaggaaggaccagttactgttgctcctcgcgagacagtgaaagagctagagcaagcagcaaggaggcttgctaaggctgtgggttatgttggtgctgctactgttgaatatctctacagcatggagactggtgaatactattttctggaacttaatccacggttgcaggtatattcttttgaacattcctctggacttagttttttgtcgtcagttatttacattgttaaatggcatacatccaggttgagcatccagtcaccgagtggatagctgaagtaaacttgcctgcagctcaagttgcagttggaatgggtatacccctttggcaggttccaggtaataattatattattgtaagttttttagttactttcccatgttatttctgtgcctaactttctccttatacagagatcagacgtttctatggaatggacaatggaggaggctatgacatttggaggacaacagcagctcttgctactccatttaacttcgatgaagtggattctcaatggccaaagggtcattgtgtagcagttaggataaccagtgaggatccagatgacggattcaagcctaccggtggaaaagtaaaggtgagatttcatgatgccgtctatggttctagcacattagatttgtaaactgaccggaccttgattttcttataattcaggagatcagttttaaaagcaagccaaatgtttgggcctatttctctgttaaggtaagctgttcatggctctgttgcactgttatattgtcgagttgggctttgaccaagtattaaccaaatcgaacacatttttgttcccccttttatctgttttcagtccggtggaggcattcatgaatttgctgattctcagtttggtatgcaaaatttgaccctgtgaatattcctctttgctatttgtattggtccttacgtttggaagattactcttttcatttcaggacatgtttttgcatatggagtgtctagagcagcagcaataaccaacatgtctcttgcgctaaaagagattcaaattcgtggagaaattcattcaaatgttgattacacagttgatctcttgaatgtaagaaatacacctgtatattgaatccctgcttttgatgtaatacaaccattttacatctggcattcctttaaagttatcccatgcctcaattttctgtatctttaaatcaggcctcagacttcaaagaaaacaggattcatactggctggctggataacagaatagcaatgcgagtccaagctgagagacctccctggtatatttcagtggttggaggagctctatatgtaagaaactatgcccctcttactgcagcttttgtcaaaccaattgcgaaaaacacaattagttgtttaatgcaaatcactgtcttgtgctgcagaaaacaataacgagcaacacagacactgtttctgaatatgttagctatctcgtcaagggtcagattccaccaaaggtagtgttttaatgggcttaaactctggatattgcttgaagatgaatgttgttgaatgttgaccaatttcttttgtgcagcatatatcccttgtccattcaactgtttctttgaatatagaggaaagcaaatatacagtaagtcttacattcctttaaaaaaatgagtcgttgtgatgaagtaacagctatcgttgacgctcatctacaccatgtcacagattgaaactataaggagcggacagggtagctacagattgcgaatgaatggatcagttattgaagcaaatgtccaaacattatgtgatggtggacttttaatgcaggtgattttgtcttgtttttatacctgtccataagtatgatatataatgttgtgaagtactggtgaaagagttctgattcagtagctgtaatttcttcagttggatggaaacagccatgtaatttatgctgaagaagaggccggtggtacacggcttctaattgatggaaagacatgcttgttacaggtaataattgtctgtttgttcctttccttctaactaatcttggtgtttgatttgatattttccagccctatttgtggctttttacgtcattcgcttcattagcattcatttctttccactttcatttaaagaaatttaattacgatgtttatttctagtcatgtgccataagaaaccacaattaagtcattattatggactaattgatgtcacaacaagctgctattgtggtaaatgtgactacctaagcagccaaacaaaccaggtcataatgataagcgttatcaacggcatgtcttgtgaagttgtgatgtaaagacaagttacatagctgtaaaaaatttaatacggctccagtttttatattgctacttctgtttcttaatctgagcaactactgaccacaatgctttgtgtttattacaaatttaatcaagaatttattataatcaagctgtaataaactatgtcatgaaccttctagggcatcatgttactgcatcaattttatggtgataaaaaaggaactattaataattaatgattcttgatcatgccacattgtatccttgtgtaaataaatgacacatcgttcttgcagaatgatcacgatccttcaaggttattagctgagacaccctgcaaacttcttcgtttcttggttgccgatggtgctcatgttgaagctgatgtaccatatgcggaagttgaggttatgaagatgtgcatgcccctcttgtcacctgctgctggtgtcattaatgttttgttgtctgagggccagcctatgcaggttacatcacaacgtttccattgcttctgctgtacataacaattgcacgtaaagtatctgaacttaatatattttttctaggctggtgatcttatagcaagacttgatcttgatgacccttctgctgtgaagagagctgagccatttaacgggtctttcccagaaatgagccttcctattgctgcttctggccaagttcacaaaagatgtgccacaagcttgaatgctgctcggatggtccttgcaggatatgatcacccgatcaacaaagtaaacatcaagaaccttgcagtacctatatttctggttttttgtcacgtgtttcttgttctcctcaagcaccttttttttttatgaattctggattatccctaattcctccttgactttggctcccttatgctacaaaactgtttgtaacctatggaagtttattatgcctgtcttggaaaatctgaatttgggtgccctttctcgtatgttaatcatggtcactactttacagattgtttttatccttgtgctatttttctctctttcagcaattggtttgattttttccgatcatacctatttgttcagcatttgtttacctttttcattatacccggctttcttttcaggttgtacaagatctggtatcctgtctagatgctcctgagcttcctttcctacaatgggaagagcttatgtctgttttagcaactagacttccaaggcttcttaagagcgaggtatgtgataatagacgtgatatgtagcgtctgggtagatttcaatctgccatgtggatttctaattggttatatagaagggttgtatcactttgcataagcatcatgattttacattgtccaatcaccggtaattttccgtagcttattgtgtaacttctaaaattgccttttcctaataatgtaatcaaaacttgaaatatttcattttaatacttcttagcttggaacatttgatacttcatctcatcaatttgcaccgtagctcagaagttctcatttgattttaacccagtttttgcttattgatctttatattttttttgtgttctaccataacggtttcaactttttatgcaaccagttggagggtaaatacagtgaatataagttaaatgttggccatgggaagagcaaggatttcccttccaagatgctaagagagataatcgaggtcagtattaggtttcttttatgatatccttgtctagaacttctactgctttttgtaacatgttttcttgtaggaaaatcttgcacatggttctgagaaggaaattgctacaaatgagaggcttgttgagcctcttatgagcctactgaagtcatatgagggtggcagagaaagccatgcacactttattgtgaagtcccttttcgaggactatctctcggttgaggaactattcagtgatggcattcaggttatctgacattccaaaactcagatctactagatatcattgctttaaaaggatattcctttttcccttttatttatgagaacattatcaactaatgttcatgcacatattatagttcacaccagaatctatcagtaattaagtagctaatgattttaggtgtaaaaaaggtagcaaatagttttcttatggcttatgtcttgtttccttagaaatgctttctgcttatttgtttccttcaactgtcatgttttgtagtctgatgtgattgagcgcctgcgccaacaacatagtaaagatctccagaaggttgtagacattgtgttgtctcaccaggtaaatgttttgtgatctgatggcttattgcaaatgattactgaagcagtcttcattacttaaaattcgattttgttgtagggtgtgagaaacaaaactaagctgatactaacactcatggagaaactggtctatccaaaccctgctgcctacaaggatcagttgactcgcttttcttccctcaatcacaaaagatattataaggtgacaatggcaacctaaaataatggaagcttttgaataatacttttctgatatcttagtctaatgaagtacttacgtcataataaatgcagttggcccttaaagctagcgagcttcttgaacaaaccaagcttagtgagctccgcacaagcattgcaaggagcctttcagaacttgagatgtttactgaagaaaggacggccattagtgagatcatgggagatttagtgactgccccgctgccagttgaagatgcactggtttctttgtttgattgtagtgatcacactcttcagcagagggtgatcgagacgtacatatctcgattataccaggtattacataaaatcattttttggacttgatcatactctccctttgcatttctaggaagcatacactaaagttcctattgaaacaagatgcttatgcttctttaaaataaatctggcagaatctaggtgtggaaatatttgattttactacatcttactgctcttcaagttggctaacaccaaaaccattttcagcctcatcttgtcaaggatagtatccagctgaaatatcaggaatctggtgttattgctttatgggaattcgctgaagcgcattcagagaagagattgggtgctatggttattgtgaagtcgttagaatctgtatcagcagcaattggagctgcactaaaggatacatcacgctatgcaagctctgagggtaacataatgcatattgctttattgggtgctgataatcaaatgcatggaactgaagacaggtatgttcatgtgcaatattagtgctaatgagctgtatctggttgttaatatttggtggaataattcctttaataatttaactcattcctttcagtggtgataacgatcaagctcaagtcaggatagacaaactttctgcaacactggaacaaaatactgtcacagctgatctctgtgatgctggtgtgaaggttattagttgcattgttcaaagggatggagcactcatgcctatgcgccataccttcctcttgtcggatgaaaagctttgttatgaggaagagccggttctccggcatgtggagcctcctctttctgctcttcttgagttggtatgtgactatcaaaatgcctgcgtgttgtttgatacactccatagtccatatgctttaattatcctgtttgctatttgtatttatttagcctgttgtggttacagggtaagttgaaagtgaaaggatacaatgaggtgaagtatacaccgtcacgtgatcgtcagtggaacatatacacacttagaaatacagaaaaccccaaaatgttgcacagggtgtttttccgaactcttgtcaggcaacccggtgcttccaacaaattcacatcaggccacatcagtgatgttgaggtgggaggagctgaggaatctctttcatttacatcgagcagcatattaagatcgctgatgactgctatagaagagttggagcttcacgcgattaggacaggtcactctcatatgtttttgtgcatattgaaagagcaaaagcttcttgatcttgttcctgtttcagggtaagcctgcacactgttcatttggtggcacataataggtcttgctcttgtgttttgccttcaatgaacttttcatcttactcaggaacaaagttgtggatattggccaagatgaagctactgcatgctcgcttctgaaagaaatggctctacagatacatgaacttgtgggtgcaaggatgcatcatctttctgtatgccaatgggaggtgaaacttaagttggacagcgatgggcctgcaagtggtacctggagagtcgtaacaaccaatgttactagtcacacctgcactgtcgatgtaagttccttccccttgcatcttgtttttctgtgtgtaaccaatcaaactaaattgaacttgtagcatttattcatagaactattatgatcatttagttgtcattcccacctaattatgtttggaagctcattgtgtttttaatgcttttagatctaccgtgaggttgaagatacagaatcacagaaactagtataccactctgctccatcgtcatctggtcctttgcatggcgttgcactgaatactccatatcagcctttgagtgttattgatctgaaacgttgctccgctagaaacaacagaactacatactgctatgattttccgttggtgagtatctccctctctatctctatacatgtatgtattgtgttagcagattcttagtgatatcatgtgtccaaaagctgacaagtactcaaaaatgtaggcatttgaaactgcagtgcagaagtcatggtctaacatttctagtgacaataaccgatgttatgttaaagcaacggagctggtgtttgctcaaaagaatgggtcatggggcactcctgtaattcctatggagcgtcctgctgggctcaatgacattggtatggtagcttggatcttggacatgtccactcctgaatatcccaatggcaggcagattgttgtcatcgcaaatgatattacttttagagctggatcgtttggtccaagggaagatgcattttttgaaactgttaccaacctagcttgtgagaggaagcttcctctcatctacttggcagcaaactctggtgctcggatcggcatagcagatgaagtaaaatcgtgcttccgtgttggatggtctgatgatggcagccctgaacgtgggtttcagtacatttatctgactgaagaagaccatgctcgtattagcacttctgttatagcgcacaagatgcagcttgataatggtgaaattaggtgggttattgattctgttgtggggaaggaggatgggctaggtgtggagaacatacatggaagtgctgctattgccagtgcctattctagggcctatgaggagacatttacgcttacatttgtgactggacggactgttggaataggagcatatcttgctcgacttggcatacggtgcatacagcgtactgaccagcccattatcctaaccgggttctctgctttgaacaagcttcttggccgggaagtgtacagctcccacatgcagttgggtggccccaaaattatggcgacaaacggtgttgtccatctgacagtttcagatgaccttgaaggtgtgtctaatatattgaggtggctcagctatgttcctgccaacattggtggacctcttcctattacaaaatctttggacccacctgacagacccgttgcatatatccctgagaatacatgtgatcctcgtgcagccatcagtggcattgatgatagccaagggaaatggttggggggcatgttcgacaaagacagttttgtggagacatttgaaggatgggcgaagtcagtagttactggcagagcgaaactcggagggattccggtgggtgttatagctgtggagacacagactatgatgcagctcatccctgctgatccaggccagcttgattcccatgagcggtctgttcctcgtgctgggcaagtctggtttccagattcagctactaagacagctcaagcaatgctggacttcaaccgtgaaggattacctctgttcatccttgctaactggagaggcttctctggtgggcaaagagatctttttgaaggaatccttcaggctgggtcaacaattgttgagaaccttaggacatacaatcagcctgcctttgtatatatccccaaggctgcagagctacgtggaggggcttgggtcgtgattgatagcaagataaatccagatcgaattgagttctatgctgagaggactgcaaagggtaatgttcttgaacctcaagggttgattgagatcaagttcaggtcagaggaactccaagagtgcatgggcaggcttgacccagaattgataaatctgaaggcaaaactcctgggagcaaagcatgaaaatggaagtctatctgagtcagaatcccttcagaagagcatagaagcccggaagaaacagttgttgcctttgtatactcaaattgcggtgcggtttgctgaattgcatgacacttcccttagaatggctgctaagggtgtgattaagaaggttgtagactggaaagattctaggtctttcttctacaagagattacggaggaggatatccgaggacgttcttgcaaaggaaattagaggtgtaagtggcaagcagttctctcaccaatcagcaatcgagctgatccagaaatggtacttggcttctaagggagctgaagcagcaagcactgaatgggatgatgacgatgcttttgttgcctggagggaaaaccctgaaaactaccaggagtatatcaaagaacttagggctcaaagggtatctcagttgctctcagatgttgcagactccagtccagatctagaagccttgccacagggtctttctatgctactagagaaggtgcgcatacttactgttttattacttgaaagtaattattgtggttgagtgaaatgttgccatcttatgtatatatagtgtcttaacaaataatgttaatgctttttctttggtcacttgttcagatggatccctcaaggagagcacagtttgttgaggaagtcaagaaagtccttaaatga

SEQ ID NO: 962 - protein, 2311 aa, Triticum aestivum
MGSTHLPIVGFNASTTPSLSTIRPVNSAGAAFQPSAPSRTSKKKSRRVQSLRDGGDGGVSDPNQSIRHGLAGIIDLPKEGTSAPEVDISHGSEEPRGSYQMNGILNEAHNGRHASLSKVVEFCTALGGKTPIHSVLVANNGMAAAKFMRSVRTWANETFGSEKAIQLIAMATPEDMRINAEHIRIADQFVEVPGGTNNNNYANVQLIVEIAVRTGVSAVWPGWGHASENPELPDALNANGIVFLGPPSSSMNALGDKVGSALIAQAAGVPTLPWSGSQVEIPLEVCLDSIPAEMYRKACVSTTEEALASCQMIGYPAMIKASWGGGGKGIRKVNNDDDVRALFKQVQGEVPGSPIFIMRLASQSRHLEVQLLCDQYGNVAALHSRDCSVQRRHQKIIEEGPVTVAPRETVKELEQAARRLAKAVGYVGAATVEYLYSMETGEYYFLELNPRLQVEHPVTEWIAEVNLPAAQVAVGMGIPLWQVPEIRRFYGMDNGGGYDIWRTTAALATPFNFDEVDSQWPKGHCVAVRITSEDPDDGFKPTGGKVKEISFKSKPNVWAYFSVKSGGGIHEFADSQFGHVFAYGVSRAAAITNMSLALKEIQIRGEIHSNVDYTVDLLNASDFKENRIHTGWLDNRIAMRVQAERPPWYISVVGGALYKTITSNTDTVSEYVSYLVKGQIPPKHISLVHSTVSLNIEESKYTIETIRSGQGSYRLRMNGSVIEANVQTLCDGGLLMQLDGNSHVIYAEEEAGGTRLLIDGKTCLLQNDHDPSRLLAETPCKLLRFLVADGAHVEADVPYAEVEVMKMCMPLLSPAAGVINVLLSEGQPMQAGDLIARLDLDDPSAVKRAEPFNGSFPEMSLPIAASGQVHKRCATSLNAARMVLAGYDHPINKVVQDLVSCLDAPELPFLQWEELMSVLATRLPRLLKSELEGKYSEYKLNVGHGKSKDFPSKMLREIIEENLAHGSEKEIATNERLVEPLMSLLKSYEGGRESHAHFIVKSLFEDYLSVEELFSDGIQSDVIERLRQQHSKDLQKVVDIVLSHQGVRNKTKLILTLMEKLVYPNPAAYKDQLTRFSSLNHKRYYKLALKASELLEQTKLSELRTSIARSLSELEMFTEERTAISEIMGDLVTAPLPVEDALVSLFDCSDHTLQQRVIETYISRLYQPHLVKDSIQLKYQESGVIALWEFAEAHSEKRLGAMVIVKSLESVSAAIGAALKDTSRYASSEGNIMHIALLGADNQMHGTEDSGDNDQAQVRIDKLSATLEQNTVTADLCDAGVKVISCIVQRDGALMPMRHTFLLSDEKLCYEEEPVLRHVEPPLSALLELGKLKVKGYNEVKYTPSRDRQWNIYTLRNTENPKMLHRVFFRTLVRQPGASNKFTSGHISDVEVGGAEESLSFTSSSILRSLMTAIEELELHAIRTGHSHMFLCILKEQKLLDLVPVSGNKVVDIGQDEATACSLLKEMALQIHELVGARMHHLSVCQWEVKLKLDSDGPASGTWRVVTTNVTSHTCTVDIYREVEDTESQKLVYHSAPSSSGPLHGVALNTPYQPLSVIDLKRCSARNNRTTYCYDFPLAFETAVQKSWSNISSDNNRCYVKATELVFAQKNGSWGTPVIPMERPAGLNDIGMVAWILDMSTPEYPNGRQIVVIANDITFRAGSFGPREDAFFETVTNLACERKLPLIYLAANSGARIGIADEVKSCFRVGWSDDGSPERGFQYIYLTEEDHARISTSVIAHKMQLDNGEIRWVIDSVVGKEDGLGVENIHGSAAIASAYSRAYEETFTLTFVTGRTVGIGAYLARLGIRCIQRTDQPIILTGFSALNKLLGREVYSSHMQLGGPKIMATNGVVHLTVSDDLEGVSNILRWLSYVPANIGGPLPITKSLDPPDRPVAYIPENTCDPRAAISGIDDSQGKWLGGMFDKDSFVETFEGWAKSVVTGRAKLGGIPVGVIAVETQTMMQLIPADPGQLDSHERSVPRAGQVWFPDSATKTAQAMLDFNREGLPLFILANWRGFSGGQRDLFEGILQAGSTIVENLRTYNQPAFVYIPKAAELRGGAWVVIDSKINPDRIEFYAERTAKGNVLEPQGLIEIKFRSEELQECMGRLDPELINLKAKLLGAKHENGSLSESESLQKSIEARKKQLLPLYTQIAVRFAELHDTSLRMAAKGVIKKVVDWKDSRSFFYKRLRRRISEDVLAKEIRGVSGKQFSHQSAIELIQKWYLASKGAEAASTEWDDDDAFVAWRENPENYQEYIKELRAQRVSQLLSDVADSSPDLEALPQGLSMLLEKMDPSRRAQFVEEVKKVLK

SEQ ID NO: 963 - DNA, 12830 bp, Setaria italica
  source 1..12830: mol_type = genomic DNA
atgtcgcaacttggattagctgcagctgcctcaaaggcgctgccactacttcctaatcgccatagaacttcagctggaactacattcccatcacctgtatcatcgcggccctcaaaccgaaggaaaagccgcactcgttcacttcgtgatggaggagatggggtatcagatgccaaaaagcacaaccagtctgtccgtcaaggtactgtgagattttattttccgattcaagtaaaattttgctttgatctatatatgaaagaattttttcttggctgatgttatttaacattgtaatgttgaaacctcaatatgtatgacatagaaagtggtagctgtggaacttgttctgataaaacagtattgcagcaagcctataatcttttcattttctggtaattgagagtaacttttaaatattcatatgatgttctcgtaactgcatttatacacatatctgtaaaagaaaaagtattttgcaagataacatatgcagtacatcaaattacatatatctgaacctttattttccttacgtattcattcctgttgaaacaaacttttacatttttttgtcagtgaaatatgcaaagaaaattagattgtagttgttaggtagtaatgtagatgtgctcagttcgaatgtttgtctgcatgtaggtcttgctggcatcatcgacctcccaaatgaggcaacatcggaagtggatatttctcagtaagaacttaaacattttacagttgtattatgtgtttattttggaaaaatattctgcagcttattgctagtttcctcaatgctacttatcttaatgttgctctgtggtgaaatattgtagtttcgtacacctcagtgtatcatagtaaatgattcaaaatatggtgctgtcttgttgcagtttgtaccacagccatagacctgtttctgtatctgttatttggggcataatgaatactacgctcacttacatgatgtggttacagcttatttcacagaactacttccagtattgctggacagcggacacttatgaaatcatatctgcatacatctttttcagacttttgttctatgtaaatgcttcacttaactggacgtatatgatagatacaaagcctatttgaaccttgttgatttatgacgaccatgcatattgtaagtgttctgaacacaggagtaatcctttcctttggtccttttgcagtggatccgaggatcccagggggccaaccgattcatatcaaatgaatgggattgtaaatgaagcacataatggcagacatgcctcagtgtccaaggttgttgaattttgtgcggcgctaggtggcaaaacaccaattcacagtatactagtggccaacaatggaatggcagcagcaaagttcatgaggagtgtccggacatgggctaatgatacttttggatcggagaaggcgattcagctcatagctatggcaactccagaagacatgaggataaatgcagaacacattagaattgctgatcaatttgtagaggtgcctggtggaacaaacaataacaactatgcaaatgttcaactcatagtggaggttagccctgctaatcatttggtttactactgttctgctatttcttttctttcttggtaaccattggcatatttaagtagagaaattcgtatttctccagctcagctacttcggaagtctaattgttaccattaaaactatggatggacttttgatattgtaggtagcagaaagaataggtgtttctgctgtttggcctggttggggtcatgcttctgagaatcctgaacttccagatgcattgaccgcaaaaggaattgttttccttgggccacctgcggcatcaatgaatgcattgggagataaggtcggttcagctctcattgctcaagcagctggggtcccgaccctttcgtggagtggatcacatgtgagtctcactctctctttgacaactatcttctgatctcacctctattcattttcatataataattacactacatttaggttgaagttccattagagtgctgcttagatgcgatacctgaggaaatgtatagaaaagcttgtgttactaccacagaagaagctgttgcgagttgtcaggtggttggttatcctgccatgattaaggcatcctggggaggtggtggtaaaggaataagaaaggttcgttattttatgtggtaaccatctatggagattgtgcacactggagttgagcgtggagagctaaccacctacttgtcatgattaacttaatctccctggtaggttcataatgacgatgaggttagagcactgtttaagcaagtacaaggtgaagtccctggctccccaatatttatcatgaggcttgcatcccaggttagtttttattctggaagttatattccacccctttttgttgtcgagttattgatgtatgttctggaagcttcatctgatacattattgactaatgaaccaatggccatcatttatggagaccaacatatatatgaaaagttaattaatgggcattgttgaaagagacaacagctgagtggataccatactgtttttaggatctagaaatcattgtgttctggatgagacactgcacttgctggagttggactaagcttttcttagttttgaataacatgttgtacatgaaccatttatgtcaatttacagtcagtatcatggaaaggttgggataatggctggagagacgcaacacatcttgtttcccaacactttgtggggaagatgttgaccctttttctgaaactatcttttggactaccttgtacacttgtgttaggttttaaagatccttactttatatttgattctaaatcttgttgtctattgtagagtcgtcatcttgaagttcagttgctttgtgatcaatatggcaatgtggcagcacttcacagtcgtgattgcagtgtgcaacggcgacaccaaaaggtttgccccccacccccacctacccacacacacaattatagaaccatgcattttgttctgcattctatttctcacttgtagttccgttcatatttttttataacagattattgaggaaggcccagttactgttgctcctcgtgagacagttaaagcgcttgagcaggcagcaaggaggcttgctaaggctgtgggttatgttggtgctgctactgttgaatacctttacagcatggagactggggaatactattttctggagcttaatcccagattacaggtttgctccctttaacatcattattgattaattaacctgctgggaatcctttacaatgctgaatgatatacgttcaggtcgagcatccagtcactgagtggattgctgaagtaaatcttcctgcagctcaagttgcagttggaatgggcatacctctttggcagattccaggtaattaccaatttaccaacttatttagttccttattattttaatctctaaattgtacccttatgatagaaatcagacgtttctatggaatggactatggaggaggatatgacatttggaggaaaacagcagctcttgccacaccatttaattttgatgaagtagattctcaatggccaaagggccattgtgtagcagttagaattactagcgaggatccagatgatggtttcaaacctactggtgggaaagtgaaggtgaggttttgtaatgccagatatattggtcaaatagatcaagtttggttaaatgaccaggtcctgattttttttcaggagataagttttaaaagcaagcctaatgtttgggcctacttctcagtaaaggtaatttgtttgccatgttaatcttgcacataattttgtattgtgcagataatttggatggtactgtttgttaaccattcatcgtttcatttagttaaacaaacaatttgcactctgatccccatttaatctgttttcagtctggtggaggcattcatgaatttgctgattctcagtttggtatgtgcaaagctagcggatattctttgtaaatttgttttggacttttggtcctcattgtcaaatgattgcttgtttcattacagggcatgtttttgcatatgggctctctagatcagcagcaataacgaacatggctcttgcattaaaagagattcaaattcgtggagaaattcattcaaatgttgattacacagttgatctcttaaatgtgagaaacattaagcaccttttaagcctccttttctttttgttggttttatactatcattgtttttgtttttccattacgcctaaacctgtggtgctatttccctatattaatccaggcttcagacttcagagaaaataagattcatactggctggcttgataccagaatagctatgcgtgttcaagctgagaggcccccatggtatatttcagtggttggaggagctctatatgtaagatgaagaaacaacaccactctgctagcacttttctctaatttaaatcgtgaaaaacataccaatgtatggtctaatttaaatcattgttacatcttacagaaaacagtaactgccaatgcagccactgtttctgattatgtcagttatctcaccaagggccagattccaccaaaggtatgtttttgtgggatacaatggatattttttgaggtgaagaatggttgaccaataattcttatatgcagcatatatcccttgtcagttcaacagttaatctgaatatcgaagggagcaaatacacagtaagtgtgatattccataagaaaatctattttagctacaataaagttagacattctgagttttgtccgcattgtgttgtaggttgaaactgtaaggactggacatggtagctacagattacgaatgaatgattcagcaattgaagcgaatgtacaatctttatgtgatggaggcctcttaatgcaggtaacttgttccttcttttatgctttattaataactctgataaatggtttcaaagttagtggcggttctgattgttgaactgtaatggcttcagttggatggaaatagccatgtaatttacgcggaagaagaagctggtggtacacgacttctgattgatggaaagacatgcttgttacaggtgcacactctttttccctatatattcttggtgtctgattgggaaacttctgccagatttgtctgtatctttcattactgcatttggttcttattgtttgctttctacaggagacatcacataagaaatttgtgactaatccttgtgaatttaaaacacttgattctgttggaatttaactacaacacctgacttaaaaatcactgtaatcaggggtgattgaaaatcgagaagagacctttttaagattgtaagattttggccatactacactatgccccaagtagctgatgactttgcgtttttgcagaatgatcatgatccatcaaagttattagctgagacaccctgcaaacttcttcggttcttggttgctgatggtgctcatgttgatgctgatgtaccatatgcggaagttgaggttatgaaaatgtgcatgcctctcttgtcgcctgcttctggtgtcattcatgttatgatgtctgagggccaggcattgcaggttatattcgtacatctgccctccttgcattgtgcttgcatcacataatcattacatgtaacatttctgaacttatattctgttctaggctggtgatcttatagcaaggctggatcttgatgacccttctgctgtgaaaagagctgaaccatttcatggaatatttccacaaatggaccttcctgttgctgcctctagccaagtacacaaaagatatgatgcaagtttgaatgctgctcgaatggtccttgcaggatacgagcataatatcaatgaagtaaatattccatcttattgtgataatcttccatttcttttcctttttttatcatgtgtttctttatagtatgttttgtgcactccctccatcccaaaaagagtgttattctaggtttgtccttgtcaaactatcttaagtttgaccaagattatattaaaaaagtaccaatatttatgagaccaaataagtataattaggttcatcatgaaatatgcttttgggacagagagagttagcttttatgagttaagggctagccagtcttccattttttggttctgcttacttttgttccaaaatttgtataatctatggaaaattctaatggtcagtatatgctaatcatgctcatgttagttcaactgcaaatttatctgctacgtaaataattttctttctttaagcagttctatcttctagtttcataattttcagacacatttctttaattgaagttattgtatttcggtgtctatctcatgaagtccttagcatttacttatcacatattgattgattcattttaaactctgcttcttttcaggttgtacaagatttggtatgctgcctggatgatcccgagcttcccttcctacagtgggatgaacttatgtcagttctagcaactaggcttccaagaaatcttaagagtgaggtatgaaacaattggcaagatatagccaatctggcttaaaggaaagatgattcattttactagataatcttaattttgtacatattggtttatgttgatgacaggaaaatgtggtgtcaccagagtaaaactatgatattttgtaacactagtttgcactgtgttgtgtgcattaaactctgtagcttgccgtagtttatcatgcagttagaggatagaattgtattcatgtgcaaaaattcaaaatatttcactttagcatttcaccagatagaagctgaattttcagtaagttttgttttgatttctgggttgcagttcttctgatatttccttacataaccctatttcattctatctctgatatttctatcttttattatgcagttagaggataaatacatggaatacaagttgaacttttaccatgggaaaaacaaggacttcccgtccaagctgctgagagacatcattgaggtcagttttaggtttcttttgtggcattgctttttaaactgtttgcccactttaactcttttttttttaggcaaatcttgcatatggttcagagaaggaaaaagctacgaatgagaggcttattgagcctcttatgagcctacttaagtcatatgagggtgggagagaaagccatgctcattttgttgtcaagtcccttttcaaggagtaccttgctgtggaagaacttttcagtgatgggattcaggttatcttacatatccaaactgaacatatcagcactaagaaaagcacaaaaatgttcgctcctttccattctcctagttaggagcacattttaacaaatggcgtgcatattgagctgaaaacatttgcatggcttcagattcaatttactggatacaatctgacttattattattttttaattatgcctttacagtctgatgtgattgaaaccctgcgtcatcagcacagtaaagacttgcagaaggttgtagacattgtgttgtctcaccaggtaatttcttgatggtctgataactgtgcttatgacactgaaacaatctttgttattgatagcgtgattttgttcatagggtgtgaggaacaaagctaagcttgtaacagcacttatggaaaagctggtttatccaaatcctgctgcttacagggatctgttggttcgcttttcttcactcaatcataaaagatattataaggtgcaggaacttgaaataacctagatattcctgctattattttctttgatttttattctaactaattctatgcatcttgataaacacagttggcccttaaagcaagcgaacttcttgaacaaactaaactaagtgaactccgtgcaagcatcgcaagaagcctttctgatctggggatgcataagggagaaatgactattgaagatagcatggaagatttagtctctgccccattacctgtcgaagatgcacttatttctttgtttgattacagtgatccaactgttcagcagaaagtgatcgagacatacatatctcgattgtatcaggtattatatcaactaacttgatatctttcatagtcccactgagcacatctggtatgatcatctttttcatatatatatataacacacacacacacaaagaagtgtcctaatgacatgatatgatcatcttttcatttcacaaagagaaatattgagaaacgggatactgatgattggctaaaattaattgggtgtgaaagttgtgatcttccaacttgtactatatgtatagtaaaacatgttggctaacctgccaataatattttttcagcctcttcttgtgaaagatagcatccaagtgaaatttaaggaatctggtgcctttgctttatgggaattttctgaagggcatgttgatactaaaaatggacaagggaccgttcttggtcgaacaagatggggtgccatggtagctgtcaaatcagttgaatctgcacgaacagccattgtagctgcattaaaggattcggcacagcatgccagctctgagggcaacatgatgcacattgccttattgagtgctgaaaatgaaaataatatcaggtctgctcatgtgcaatatcaggtccaatggaatttttgtctgtgatctgtgtaactctgtgtaacctagtccatttctttcagcagtgatgatcaagctcaacataggatggaaaaacttaacaagatactcaaggatactagtgtcgcaaatgatcttcgagctgctggtttgaaggttataagttgcattgttcaaagagatgaagcacgcatgccaatgcgccacacattactctggtcagatgaaaagagttgttatgaggaagagcagattcttcggcatgtggagcctcccctctccatgcttcttgaaatggtctgtttataaaattaccgcatgttgttttgctacattctgttcttatagtttgcttattttcttcactatttataaatcatgttacctattatgaatacaggataagttgaaagtgaaaggatacaatgaaatgaagtatactccatcacgtgatcgtcaatggcatatctacacactaagaaatactgaaaaccccaaaatgttgcatagggtatttttccgaactattgtcaggcaacccaatgcaggcaacaagtttatatcagcccaaattggcgacactgaagtaggaggtcctgaggaatctttgtcatttacatctaatagcattttaagagccttgatgactgctattgaagaattagagcttcatgcaattaggactggtcattctcacatgtatttgtgcatattgaaagaacaaaagcttcttgatctcattccgttttcagggtaagtgtgcacataatcatttttgggaaacattatggcttgcctatttggttggcatcctcaacaatgcttttcgttttaatcaggagcacaatcgtcgatgttggccaagacgaagctactgcttgttcacttttaaaatcaatggctttgaagatacacgaacttgttggtgcacagatgcatcatctttctgtatgccagtgggaggtgaaactcaagttgtactgcgatgggcctgccagtggcacctggagagttgtaactacaaatgttactagtcacacttgcaccgttgatgtaagttgtccctactggtttcttattttgtattgcacacattaaaatatacgtcaacaggtggttgttttatattacgaactattgtcccatttaattatgttctgaagcacatagcatttctaatggttttagatctaccgggaagtggaagatactgaatcgcagaagttagtataccattcagcttctccgtcagctagtcctttgcatggtgtggccctggataatccgtatcaacctttgagtgtcattgatctaaaacgctgctctgctaggaacaacagaactacatattgctatgattttccactggtgagttcacctctcttttgtacctatttgcattatcggtattttgaatttgaacctaaactgataatggctaaaaatttgtaggcatttgaaactgccctgcagaagtcatggcagtccaatggctccagtgtttctgaaggcagtgaaaatagtaggtcttatgtgaaagcaacagagctggtgtttgctgaaaaacatgggtcctggggcactcctataatttccatggagcgtcccgctgggctcaatgacattggcatggtagcttggatcttagagatgtccactcctgaatttcccaatggcaggcagattattgtcatagcaaatgatattactttcagagctggatcatttggcccaagggaagatgcgttttttgaagctgtcacgaacctggcctgcgagaggaagcttcctcttatatacttggcagcaaactccggtgctaggattggcatagccgatgaagtgaaatcttgcttccgtgttgggtggtccgatgaaggcagccctgaacggggttttcagtacatttatctgactgacgaagactatgcccgtattagcttgtctgttatagcacacaagctgcagctggataatggtgaaattaggtggattattgactctgttgtgggcaaggaggatgggcttggtgttgagaatatacatggaagtgctgctattgccagtgcttattctagggcatatgaggagacatttacacttacatttgtgactgggcggactgttggaataggagcatatcttgctcggctcggtatacggtgcatacagcgtcttgaccagcctattattttaactgggttttctgccctgaacaagcttcttgggcgggaagtgtacagctcccacatgcagttgggtggtcctaagatcatggcgaccaatggtgttgtccacttgactgtttcagatgaccttgaaggtgtttccaatatattgaggtggctcagctatgttcctgccaacattggtggacctcttcctattacaaaacctttggacccaccagacagacctgttgcatacatccctgagaacacatgtgatccgcgcgcagccattcgtggtgtagatgacagccaagggaaatggttgggtggtatgtttgacaaagacagctttgtcgagacatttgaaggatgggcgaaaacagtggttacgggcagagcaaagcttggaggaattcctgttggtgtcatagctgtggagacacaaaccatgatgcagcttatccctgctgatccaggccagcttgattcccatgagcgatctgttcctcgggctggacaagtgtggttcccagattctgcaaccaagacagctcaggcattgttggacttcaaccgtgaaggattgccgctgttcatccttgctaactggagaggattctctggtggacaaagagatctgtttgaaggaattcttcaggctgggtcaacaattgttgagaaccttaggacatacaatcagcctgcttttgtctacattcctatggctggagagctgcgtggaggagcttgggttgtggttgatagcaaaataaatccagaccgaattgagtgttatgctgagaggactgctaaaggcaatgttctggaacctcaagggttaattgaaatcaaattcagatcagaggagctccaagactgtatgggtaggcttgacccagagttgataaatctgaaagcaaaactccaaggtgcaaagcttggaaatggaagcctaacagatgtagaatcccttcagaagagtatagatgctcgtacgaaacagttgttgcctttatacacccagattgcaatacggtttgctgaattgcatgatacttccctcagaatggcagctaaaggtgtgattaagaaagttgtagattgggaagaatcacgttctttcttctacagaaggctacggaggaggatctctgaagatgttcttgcaaaagaaataagaggaatagctggtgaccacttcactcaccaatcagcagttgagctgatcaaggaatggtacttggcttctcaagccacaacaggaagcactgaatgggatgatgatgatgcttttgttgcctggaaggagaatcctgaaaactataagggatatatccaagagttaagggctcaaaaggtgtctcagtcgctctccgatcttgcagactccagttcagatctagaagcattctcacagggtctttccacattattagataaggtaagcttgctatctgctggttttaccaattagtatttgtatttaacttgggttccaactggtgcttttttgctgcatctcacttctttagagtgaaaggcctaaagcctcacaggtaacctaggaactcacacacagaacacacacctacacagtagtcttttggtgctgcaattgctttctgccttttctgttttcttctctatttatacatagccaagagctacaatagggcctgtaattgaaagctaatagctacagccatcactcccttgattcgcttattattctcactaactagcagctggaaatctgctaagtaaataggctctgcacctagacactctgaacctggacaagctctgcacctggacagcacgcacaggattactcctaacacagagttcctattccgtttgcatggtgctagacactgcatcttgccaaatcatggttctaatacctacagcttttttttttgtgtaaccgtcttacatgttcctttggatgcttgttcagatggatccctctcagagagccaagttcattcaggaagtcaagaaggtcctgggttga

SEQ ID NO: 964 - protein, 2322 aa, Setaria italica
MSQLGLAAAASKALPLLPNRHRTSAGTTFPSPVSSRPSNRRKSRTRSLRDGGDGVSDAKKHNQSVRQGLAGIIDLPNEATSEVDISHGSEDPRGPTDSYQMNGIVNEAHNGRHASVSKVVEFCAALGGKTPIHSILVANNGMAAAKFMRSVRTWANDTFGSEKAIQLIAMATPEDMRINAEHIRIADQFVEVPGGTNNNNYANVQLIVEVAERIGVSAVWPGWGHASENPELPDALTAKGIVFLGPPAASMNALGDKVGSALIAQAAGVPTLSWSGSHVEVPLECCLDAIPEEMYRKACVTTTEEAVASCQVVGYPAMIKASWGGGGKGIRKVHNDDEVRALFKQVQGEVPGSPIFIMRLASQSRHLEVQLLCDQYGNVAALHSRDCSVQRRHQKIIEEGPVTVAPRETVKALEQAARRLAKAVGYVGAATVEYLYSMETGEYYFLELNPRLQVEHPVTEWIAEVNLPAAQVAVGMGIPLWQIPEIRRFYGMDYGGGYDIWRKTAALATPFNFDEVDSQWPKGHCVAVRITSEDPDDGFKPTGGKVKEISFKSKPNVWAYFSVKSGGGIHEFADSQFGHVFAYGLSRSAAITNMALALKEIQIRGEIHSNVDYTVDLLNASDFRENKIHTGWLDTRIAMRVQAERPPWYISVVGGALYKTVTANAATVSDYVSYLTKGQIPPKHISLVSSTVNLNIEGSKYTVETVRTGHGSYRLRMNDSAIEANVQSLCDGGLLMQLDGNSHVIYAEEEAGGTRLLIDGKTCLLQNDHDPSKLLAETPCKLLRFLVADGAHVDADVPYAEVEVMKMCMPLLSPASGVIHVMMSEGQALQAGDLIARLDLDDPSAVKRAEPFHGIFPQMDLPVAASSQVHKRYDASLNAARMVLAGYEHNINEVVQDLVCCLDDPELPFLQWDELMSVLATRLPRNLKSELEDKYMEYKLNFYHGKNKDFPSKLLRDIIEANLAYGSEKEKATNERLIEPLMSLLKSYEGGRESHAHFVVKSLFKEYLAVEELFSDGIQSDVIETLRHQHSKDLQKVVDIVLSHQGVRNKAKLVTALMEKLVYPNPAAYRDLLVRFSSLNHKRYYKLALKASELLEQTKLSELRASIARSLSDLGMHKGEMTIEDSMEDLVSAPLPVEDALISLFDYSDPTVQQKVIETYISRLYQPLLVKDSIQVKFKESGAFALWEFSEGHVDTKNGQGTVLGRTRWGAMVAVKSVESARTAIVAALKDSAQHASSEGNMMHIALLSAENENNISSDDQAQHRMEKLNKILKDTSVANDLRAAGLKVISCIVQRDEARMPMRHTLLWSDEKSCYEEEQILRHVEPPLSMLLEMDKLKVKGYNEMKYTPSRDRQWHIYTLRNTENPKMLHRVFFRTIVRQPNAGNKFISAQIGDTEVGGPEESLSFTSNSILRALMTAIEELELHAIRTGHSHMYLCILKEQKLLDLIPFSGSTIVDVGQDEATACSLLKSMALKIHELVGAQMHHLSVCQWEVKLKLYCDGPASGTWRVVTTNVTSHTCTVDIYREVEDTESQKLVYHSASPSASPLHGVALDNPYQPLSVIDLKRCSARNNRTTYCYDFPLAFETALQKSWQSNGSSVSEGSENSRSYVKATELVFAEKHGSWGTPIISMERPAGLNDIGMVAWILEMSTPEFPNGRQIIVIANDITFRAGSFGPREDAFFEAVTNLACERKLPLIYLAANSGARIGIADEVKSCFRVGWSDEGSPERGFQYIYLTDEDYARISLSVIAHKLQLDNGEIRWIIDSVVGKEDGLGVENIHGSAAIASAYSRAYEETFTLTFVTGRTVGIGAYLARLGIRCIQRLDQPIILTGFSALNKLLGREVYSSHMQLGGPKIMATNGVVHLTVSDDLEGVSNILRWLSYVPANIGGPLPITKPLDPPDRPVAYIPENTCDPRAAIRGVDDSQGKWLGGMFDKDSFVETFEGWAKTVVTGRAKLGGIPVGVIAVETQTMMQLIPADPGQLDSHERSVPRAGQVWFPDSATKTAQALLDFNREGLPLFILANWRGFSGGQRDLFEGILQAGSTIVENLRTYNQPAFVYIPMAGELRGGAWVVVDSKINPDRIECYAERTAKGNVLEPQGLIEIKFRSEELQDCMGRLDPELINLKAKLQGAKLGNGSLTDVESLQKSIDARTKQLLPLYTQIAIRFAELHDTSLRMAAKGVIKKVVDWEESRSFFYRRLRRRISEDVLAKEIRGIAGDHFTHQSAVELIKEWYLASQATTGSTEWDDDDAFVAWKENPENYKGYIQELRAQKVSQSLSDLADSSSDLEAFSQGLSTLLDKMDPSQRAKFIQEVKKVLG

SEQ ID NO: 965 - DNA, 12654 bp, Lolium perenne
  source 1..12654: mol_type = genomic DNA
atgggatccacgcatttgcccatcgttgggcttaatgcctccacaacgccgtcgctgtccactctccgccagatcaattcagctggttccacattccaatctccttccccttcaaggtcgtccaagaagaaaagccgccgtgttaagtcaataagggacgatggcgatggaagcgtgtcagaccctgcagggcataacaagtctattcgccaaggtaaccccaggaccatctcctttctattttgttttcaacctcagacttgcatagatgatgaaagttttcttgactcagagcatgctgattttagtgtaagatagctcaatattactattacgaaatgatactagttaagatacaaatcaatgtagcaatcttcacatattgtttcaatggttttgctaaatcttagtcgcatgggatttccttttgtcacactgagctgtctgagaattcacgcagggatctaggatatcaagattagatcagatggctagcaccattgatttagacataataaaatctctgtcaacttaggtgtaagattgactctattttatttgatctatgtactagtattttttgtttgtttgtaacactatgcatattttttcctgattaattgttttcggtgaacggaatgtttaatattcaatatgatgttttcttaatgaaagggaaacaacaatacatgtatatcgcagtttaagtgcgaatgactgaatgtttttcatatatttattaatagttctagagaaagaaggatgtcgcaaaatattttcttataactttggtcggaagaataacaataacattccaaaagttggcaaaccattgcttgttctaagctattgtgtaggcttgctcagtttccaatgcatatctggatgtaggtctcgctggcatcatcgacctcccaaaggaaggcacatcagttcccgaagtggacatttcacagtatgtacttcagcacagttaaatatagttagttctcttcaaagaacagggaaaaatgtatagctcatctacagttcaatatatttaacttgttttattatctttacgcttaaatgttgaagttgtaaattctttattctcatagattgacacttcaatacatcatagttatacactgtgcacctgctagtgctggaaattgaaccatttgtcatgtggtgaactgcaatctgtaaggttatatttttgatctaataatagttataaatcatgtacaacctctctccatttataacatcattaatgcgtgatgtataagatatactccctccgtctaaaaataaatgtctcacttatctagatgcattttagttagagacacctatttttagacggagggagtagtaatgttacagggtgtgatttcgctatgtaaattatggagttacatccaactttgtaaagggaaatatcccccaaaagaggttacttcttcttaagggttacagcccaggcacattgctgttacactgcatggagattgttgggcacttacaaaacatttcactggaaagagtttttcatatacgcattttttaaatttaattgccaactgaaacccataccctactgacggatgaaagcccacttgtgtttccgattcatactaggcaatactatgtcacatgtattatggtgaccacagtaatgactttcctcgtttcttttctagtgggtctggagaccacatgggctcctaccaaatgaatgggatactgaatgaatcacataacgggagacacgcttcgctgtctaaggttgttgaattttgtatggcattgggtggaaagacaccaattcacagtgtattagtcgccaacaatggaatggcagcagctaagttcatgcggagtgtccggatatgggctaatgatacatttgggtcagagaaggcgattcagttgatagctatggcgactccggaagacatgagaataaatgcagagcatattagaattgctgatcagtttgttgaagtacctggtggaacaaacaataacaactatgcaaatgtccaactcatagtggaggtcagtactgttcacccctttgatgtgcaatttatgcacaagctactctttgttcttttagcatgacatttgacatggcaactttgcttttgcagatagcagagagaacaggtgtttcggccgtttggcctggttggggccatgcatctgagaatcctgaacttccagatgcactcactgcaaaaggaattgtttttctcgggccaccagcatcatcaatgaatgcattaggtgacaaggttggttcagctctcattgctcaagcagcaggggttccgactcttgcttggagtggatcacatgtaagcgttacattctctcggataattcatcgccttatatttgtggtggatgcattttataatgacattttattataggtggaaattccattagaactttgcttggactctatacctgaggagatgtataggaaagcttgtgttactaccgcggatgaagcagttgcaagttgtcagatgattggttatcctgccatgatcaaggcatcctggggtggtggtggtaaagggattagaaaggtacattattcatttggttgcactgtactcaagagattctgttattatgtgtgcagtgttagacctaacctttttaacatattaactcgacatctcttgcaggttaataatgatgatgaggttaaagcactgtttaagcaagtacagggtgaagttcctggctccccaatatttatcatgagacttgcatctcaggttagacttgtcttgaatttctattttccaaggatgctgtttctgggtggtatattgtacacctggaagcttcatttgctcttccttgtaggctagaattgtagtttgtaatctgtactcatatggtaattttcattttaatctcttccccctttccttttgtagagtcgacatcttgaagtccagctgctttgtgatcaatatggcaatgtagcagcacttcacagtcgtgattgcagtgtgcaacgacgacaccaaaaggtatggtcctagagatggaaaccatcacttttattacgggtctgcttacctgtagttttgaccacatggttcaattccgtcctttttgttttgttataacagataattgaggaaggaccagttactgttgctccccgtgagacagtgaaggagctagagcaagcagcaaggaggcttgctaaggctgtgggatatgttggtgctgctactgttgaatatctctacagcatggagactggtgaatactattttctggagcttaatccacggttgcaggtttgttcttttgaacactctacaggacttctattttttttggcagtcatttacatggttaaatggtctacattcaggttgagcacccagtcactgagtggatagctgaagtaaatttgcctgcagctcaagttgcagttggaatgggtatacccctttggcaggttccaggtaataataaaatcatcgtaatatctttagtttctggcccatgttatttcgttgtctaattatctccttacacagagatcagacgtttctacggaatggacaatggaggtggctatgacatttggaggaaaacagcagctcttgctactccattcaactttgatgaagtagattctcaatggccgaagggtcattgtgttgcagttaggataactagtgagaatccagatgatggattcaagcctactggtggaaaagtaaaggtgggatttcctaatgtgatatctatgtttcaagcacactagggttagtaaactcatctggtcttgatttttcgtatatttcaggagataagttttaaaagtaagccgaatgtctggggatatttctcagttaaggtaagctaagctgttcatagctctattgcagtgccatgttattttgagttctgcagaaaattggtctgcaagattttttatttgaattagtattctcattttggttttgattgactaagtactgatccaatcaaaaaatcttttcctcccctcttcatctgttttcagtctggtggaggcattcatgaatttgcagattctcagtttggtatgtaatacccagtgcatattcctctttgctatttgtattgatccttacattggaaattgctccttcgattacaggacatgtttttgcctatggagtgaccagatcagcagcaataaccagcatgtctcttgcattaaaagagattcaaatccgcggagaaattcattcaaacgttgattacacggttgatctcttgaatgtaagtaataatagcaacttgttgaaccctactttttgattttacatcaggctttccttcaaaataatcccttcttgtggtttctgcatcaggccccagacttcagagaaaacacgatccataccggctggctggataccagaatagctatgcgtgttcaagctgagaggcctccctggtacatttcagtggttggaggagctctatatgtaagccaatgaaactagttaatgttacagcaacttttggcaagccaattgtgaaaaacacaactagtgttgaaatgattgttttgtgttgtagaaaacaataaccaccaacgcggagactgtttctgaatatgtcagctacctcatcaagggtcagattccaccaaaggtagtgtcttaattggcataaactctgtatattacttgaaggtgaacgttgctgaccattatttttgtgcagcatatatcccttgtgcattcaactatttctttgaatatagaggaaatcaaatatacagtaagtgcggcattccttaagaaagattcagttataatgcaatgatagctaccattgatgctcatctacaccatgtcacagattgagattgtgaggagtggacagggtagctacagattgagaatgaatggatcgcttattgaagcaaatgtacaaacattatgtgatggtggccttctaatgcaggtatttatacttgctcataaatataatctaaggttgaaaagtactgccgaaagagttctgattctttggttgtaatttctccagctggatggaaacagccatgttatttatgctgaagaagaagcaggtggtacacggcttcttattgatggaaagacatgcttgttacaggtaaggatattctctttgtttgttcctttatctataatcttggtgtttgatgattggatttcgtattcctatttgtgacttgttactgacttactgcagtcaccttctgatcattagcactttagtttgaaacgaaaagataaatcagtattatgaactaatgaatggtacaacatgatgtttttcaagatcacaccaggaccaggtgatattaaattttaccgacagcaggtcttgtgatgtataaggacaagttacataggtgcaatatagctaggagggctccagctcttttatattgcttcttctatttctcaaatctaggttttccagcaacaatagtatttttaacaagcactaattatcataataaggcacaaaaagagttagaaggtgtcctttaacactatgtcatgtaacctttaaaagcttgtgatcagatcattttagtgatacaaaagaacaattgaatactttatgatttttttcttacacaaaaactttatgattcttgatcacactgcattgtatcctcaactaaataaatgacaaatcattctgcagaatgatcatgatccgtcaaggttattagctgaaacaccctgcaaacttcttcgtttcttggttgccgatggtgctcatgtcgatgctgatgtaccatatgcggaagttgaggttatgaagatgtgcatgcccctcttgtcacctgctgctggtgtcattaatgttttgttgtctgagggccaggcgatgcaggttatattactgcacttttttgttgcttatgctgttaataacgattgcatgtgaagcatctgaatttaatatttttttcaggctggtgatcttatagcgagacttgatcttgatgacccttctgctgtgaagagagccgaaccattcgaaggatcttttccagaaattagccttcctattgctgcttctggccaagttcacaaaaaatgtgctgcaagtttgaatgctgctcgaatggtccttgcaggatatgagcatgcgatcaacaaagtaaacttttagacccctacagtaactatatttcgaatatattgtctcatatttcctgtttttctcaaataccattatttattattattattatgaaattctggattattctgagttcctcattgacctttttctgcctttcgctacaaaatggtttctaatatataaaagttcttcatgcttgtctttgcaaatgttgattcaaatgcttttctcttatgttcatcatactcacttacgatagagatgctctttctttccgtaattaatgttttggtttggtgattcctgatcaaaccgtgtatttccttgtaattttgtcgataagcttagcatttgattactttttccattgcacctggcttctttttcaggttgtacaagatttgctatggtgcctagatacacctgagcttcctttcctacaatgggaagagcttatgtctgttttggcaactagacttccaagacgtcttaagagtgaggtatgtgataattgatatgatatggaggatctggcaaaaggggacattggcacatttagtttatgatatagaagggtcttaatccttgactaaatgatcatctcacttatcgtggtttacattgtacattgatcaatcaccttggtaattcgacataacttattgcacaacctttaaaatgtctttagattctaataatgaaataaaaattcagaatattcagcttcagttcttcataatatgaaatatttggtactttgtctcatttatttgcactctacgttgttttagttggcttgccattctaactgaatctttaaagaagttcttgtttggtttagccagttcttgtttattgatcttttgtaccttgtgttctgcctcaacggattctaatttttatgcaatcagttggagcgtaaatacgatgaacttaagttgaatattgaccatatgaagaccaaggatttccccaccgagatgcttaaagagacaatcaaggtcagtttttggtttctggtggcatcccggtctaagttgtactattttttgtaacaagttttcttttaggaaaatcttgcatatgtttctgagaatgaaatggcgacaattgaaaggcttgttgagcctctgatgagcctactgaagtcatatgagggtgggctagaaagccatgcccactttattgtcaagtcccttttcgaggagtatcttttggttgaggaactattcagtgatggcattcaggtattctttcatttcaaaactgagaaaatctactagattcatttttacgggtcattccttttaaacatatatgaactgatgttatatactccatccgtccataaaaggatgtcagaggtttgtccaaattcggatgtatctgtacactaaaaagtgtctacatccgagtttatacaaacttctgacatccttttatggacagatgttgtacatattgttgattgcatcagaacctttttttgtaattaagtaccaaatattttgtacatggcaagaaattgattgatttccccaaaatgtgttattttgtagtctgacgtgattgaacgactacgcctacaatatagtaaagaccttcagaaggttgtagatattgttttgtctcaccaggtaagttacttttggcctaatgacttggtgcaattgatcactgaagcaatcttcgtcactgatagtttgatttttttctagggtgtgagaaacaaaactaagctgatactcacgctcatggagaaactggtttatccaaatcctgctgcctacagggatcagttgattcgctttgcttccctcaaccataaaagatattataaggtgacaatggcgacctaaaagaaatggaagcttttggataatcttaatgtgatatcttaggctaacgaattactttcattgtaataatgtagttggcccttaaagcgagtgaacttcttgaacaaaccaagctcagtgaactccgcacaagcattgcaaggaacctttcagctctggagatgtttactgaggaaagggcaggtttctccttgcaagccagaaaattggccattgatgagagcatggtagatttagtcactgccccactgccagttgaagatgcacttatttccttgtttgattgtagtgatcaaactctccagcagagagtgattgagacatacatatctcgattataccaggtaatgcatgagctattttttgcatcttctgcttttctggatgcaaacactaaagtttctaatgaataagatgatcagtgtggaagtatttgatttagaacttgtaagacatttactgctctataagtgggctaacttgccaatgatattttcagcctcaacttgtgaaggatagtatccagctgaaatatcaggattctggtgttactgctttatgggaattcacccaagggcatcctgagaagagattgggtgctatggttatcctgaagtcgcttgaatctgtgtcgacagccattggagctgctctaaaggatacatcgcattatgcaagctctgcgggtaacacgatgcacattgctttgttgggtgatactcaaatgaatacagctgaagataggtatgttcatgtgcatattagtgctgatgagtttatttggtgcaattcttaaaataacttaacctatttctttcagtggtgatcatgaccgagctcaagacaggatagaccaactttctttgatactgaaacaggatactgtcacggctgatctatgtgctgctggtgtcaaggttattagttgcattgtccaaagagatggtgcactcatgcccatgcgccgtaccttcctcctgtcagatgagaagcttggttatgaggaagagccgattctccggcatgtggagcctccactttcttcacttcttgagttggtatgcaactcatcaaactgactgcatgatgttttgatacaacttaaaatgctattattttgttatctgctacttgtatttatttagcctgctttggatacaggataaactgaaagtgaaaggatacaatgagatgaagtatacaccgtcacgtgatcggcagtggcatatatacacacttagaaatactgaaaaccccaaaatgttgcacagagtatttttccgaactcttgtcagacaacccagtgctggcaacaggtttacgtcaggccatatcagcgatgttgaagggggacctgctgaggaatctctttcatttacgtctagcagcataatgaaatcgctgacgactgctatagaagaactggagcttcacgcgatcaggactggccattctcatatgtacttgtgcatattgaaggagcaaaagcttcttgaccttattcccgtttcagggtaagcttggacattgttctttttacataacatatatgccttgctcttgtgtctcaccttctcaatgtgcttttcatcgtacacaggagcactgttgtggatgttggtcaggatgaagctactgcatgctctcttttgaaagaaatggctctaaagatacatgaacttgttggtgcaagaatgcatcatctttctgtatgtcagtgggaagtgaaacttaagttggatagcgatggacctgccagtggtagctggagagttgtaacaaccaatgtcactcctcacacctgcactgtagatgtaagttttattgccttgcatcttgttttcctgtatggaactaatgaaactaaagtgaacatatgatacttatatacatagaactaccatcttacttagttgtcatttccacctcatttagacatatggtctgaagctcatggtgcttttaatgcttttagatctaccgggaggtcgaagatacagaatcacagaaactagtataccactctgcctcatcgtcatctggtcctttgcatggtgtcgcactgagtaattcgtatcagcctttgagcattattgatctaaaacgatgctctgccagggccaacagaactacatactgctacgattttccattggttagtatctatctctacgtttgtgtattctgttagcagattactattggtattacatgtcctcctaaagctgataagaactcaaaaatgtaggcatttgaaactgcagtgaggaagtcatggtctaacattcctagaaacaaccaatgttatgttaaagcgacagagctggtgtttgctgacaagaatgggtcgtggggcactcctataattcctatgcagcgtgctgctgggctcaatgacatcggtatggtagcctggatcttggacatgtccactcccgaatttcccagtggcagacagattattgttgtcgcaaatgatattacttttagagctggatcatttggcccaagggaagatgcattttttgaagctgttaccaacctggcttgtgagagaaagcttcctcttatctatttggctgcaaactctggtgctcggattggcattgccgatgaagttaaatctatcttccgtgttaaatggattgatgatagcaaccctgaacgtggatttgattacgtttatctgtctgaagaggactatggccgtattagctcttctgttatagcgcacaagacacagctagatagtggcgaaataaggtgggttatcgattctgttgtgggcaaggaggatggactaggtgtggagaacatacatggaagtgctgctattgccagtgcgtattctagggcatatgaggagacatttacacttacatttgtgactggacgaactgttggaataggagcctatcttgctcgacttggcatacggtgcatacagcgtgaagatcagcccattatcttaactgggtattctgccctgaacaagcttcttgggcgggaagtgtacagctctcacatgcagttgggtggtcccaaaatcatggcgactaatggtattgaccatctgactgttcgagatgaccttgaaggtgtttctaatatattgaggtggctcagctatgttcctgctaacattggtggacctcttcctattacaaaacctttggatccaatagacagacctgttgcatacattcctgagaatacatgtgatcctcgtgcagccataagtggcattgatgacagccaagggaaatggctgggtggtatgtttgacaaagacagttttgtggagacatttggaggatgggcgaagacagtagttactggcagagcaaaacttggagggattcctgtgggtgttatagctgtggagacacagaccatgatgcagctcgtcccagctgatccaggacagcctgattcccatgagcggtctgatcctcgtgctgggcaagtctggtttccagattctgctaccaagacagcgcaggcaatgttggacttcaaccgtgaagggttacctctattcatccttgctaactggagaggcttctctggtgggcaaagagacctttttgatggaattctgcaggctggatcaacaattgttgagaaccttaggacatataatcagcctgcctttgtatatatccccaaggctgcagagctacgtggaggtgcttgggtcgtgattgatagcaagataaatccagatcgcattgagtgctatgctgagacaactgcaaaagggaatgttctcgagcctcaagggttgattgagatcaagttcaggtcagaggaacttcaagaatgcatgggtaggcttgatccagaattgataaatctgaaagcacaactccagggagcaaagcatgaaaatggaagtctatctgacggagaatccattcagaagagcatagaagctcgaaagaaacagttgctgcctttgtacactcaaatcgcgatacggtttgctgaattgcatgatacttccctcagaatgcttgctaaaggtgtgattaggaaaattgtagattgggaagaatctcggtctttcttctacaagagattacggcggaggatatctgaggacgttcttgcaaaagaaataagaagtgtaattggtgtcgagtcttctcacaaatcagcaatggagttgattaagaagtggtacttggcttctgagacagctggaggaagcactgaatgggatgatgacgatgcttttgttgcctggagggagaaccctgaaaactacaaggagcatatcaaagagcttagggctcaaagggtatctcaggtgctctcagatgttgcagactccagttcggatttacaagccttgccacagggtctttccatgctactagataaggtacacatgcttacagttttagctgcatctattttgtttgcaagttatttgctgagggtgagtaaaatgttgctatcttcatatacacttagtctgtaaccaaacaatgccgctatctttttcatgtagtatcgtaccaaataatgtctgacacacttttctttggacactttgtagatggatccctctaggagagcagagtttattgaggaggtcaagaaggtcctcaaatga

SEQ ID NO: 966 - protein, 2320 aa, Lolium perenne
MGSTHLPIVGLNASTTPSLSTLRQINSAGSTFQSPSPSRSSKKKSRRVKSIRDDGDGSVSDPAGHNKSIRQGLAGIIDLPKEGTSVPEVDISHGSGDHMGSYQMNGILNESHNGRHASLSKVVEFCMALGGKTPIHSVLVANNGMAAAKFMRSVRIWANDTFGSEKAIQLIAMATPEDMRINAEHIRIADQFVEVPGGTNNNNYANVQLIVEIAERTGVSAVWPGWGHASENPELPDALTAKGIVFLGPPASSMNALGDKVGSALIAQAAGVPTLAWSGSHVEIPLELCLDSIPEEMYRKACVTTADEAVASCQMIGYPAMIKASWGGGGKGIRKVNNDDEVKALFKQVQGEVPGSPIFIMRLASQSRHLEVQLLCDQYGNVAALHSRDCSVQRRHQKIIEEGPVTVAPRETVKELEQAARRLAKAVGYVGAATVEYLYSMETGEYYFLELNPRLQVEHPVTEWIAEVNLPAAQVAVGMGIPLWQVPEIRRFYGMDNGGGYDIWRKTAALATPFNFDEVDSQWPKGHCVAVRITSENPDDGFKPTGGKVKEISFKSKPNVWGYFSVKSGGGIHEFADSQFGHVFAYGVTRSAAITSMSLALKEIQIRGEIHSNVDYTVDLLNAPDFRENTIHTGWLDTRIAMRVQAERPPWYISVVGGALYKTITTNAETVSEYVSYLIKGQIPPKHISLVHSTISLNIEEIKYTIEIVRSGQGSYRLRMNGSLIEANVQTLCDGGLLMQLDGNSHVIYAEEEAGGTRLLIDGKTCLLQNDHDPSRLLAETPCKLLRFLVADGAHVDADVPYAEVEVMKMCMPLLSPAAGVINVLLSEGQAMQAGDLIARLDLDDPSAVKRAEPFEGSFPEISLPIAASGQVHKKCAASLNAARMVLAGYEHAINKVVQDLLWCLDTPELPFLQWEELMSVLATRLPRRLKSELERKYDELKLNIDHMKTKDFPTEMLKETIKENLAYVSENEMATIERLVEPLMSLLKSYEGGLESHAHFIVKSLFEEYLLVEELFSDGIQSDVIERLRLQYSKDLQKVVDIVLSHQGVRNKTKLILTLMEKLVYPNPAAYRDQLIRFASLNHKRYYKLALKASELLEQTKLSELRTSIARNLSALEMFTEERAGFSLQARKLAIDESMVDLVTAPLPVEDALISLFDCSDQTLQQRVIETYISRLYQPQLVKDSIQLKYQDSGVTALWEFTQGHPEKRLGAMVILKSLESVSTAIGAALKDTSHYASSAGNTMHIALLGDTQMNTAEDSGDHDRAQDRIDQLSLILKQDTVTADLCAAGVKVISCIVQRDGALMPMRRTFLLSDEKLGYEEEPILRHVEPPLSSLLELDKLKVKGYNEMKYTPSRDRQWHIYTLRNTENPKMLHRVFFRTLVRQPSAGNRFTSGHISDVEGGPAEESLSFTSSSIMKSLTTAIEELELHAIRTGHSHMYLCILKEQKLLDLIPVSGSTVVDVGQDEATACSLLKEMALKIHELVGARMHHLSVCQWEVKLKLDSDGPASGSWRVVTTNVTPHTCTVDIYREVEDTESQKLVYHSASSSSGPLHGVALSNSYQPLSIIDLKRCSARANRTTYCYDFPLAFETAVRKSWSNIPRNNQCYVKATELVFADKNGSWGTPIIPMQRAAGLNDIGMVAWILDMSTPEFPSGRQIIVVANDITFRAGSFGPREDAFFEAVTNLACERKLPLIYLAANSGARIGIADEVKSIFRVKWIDDSNPERGFDYVYLSEEDYGRISSSVIAHKTQLDSGEIRWVIDSVVGKEDGLGVENIHGSAAIASAYSRAYEETFTLTFVTGRTVGIGAYLARLGIRCIQREDQPIILTGYSALNKLLGREVYSSHMQLGGPKIMATNGIDHLTVRDDLEGVSNILRWLSYVPANIGGPLPITKPLDPIDRPVAYIPENTCDPRAAISGIDDSQGKWLGGMFDKDSFVETFGGWAKTVVTGRAKLGGIPVGVIAVETQTMMQLVPADPGQPDSHERSDPRAGQVWFPDSATKTAQAMLDFNREGLPLFILANWRGFSGGQRDLFDGILQAGSTIVENLRTYNQPAFVYIPKAAELRGGAWVVIDSKINPDRIECYAETTAKGNVLEPQGLIEIKFRSEELQECMGRLDPELINLKAQLQGAKHENGSLSDGESIQKSIEARKKQLLPLYTQIAIRFAELHDTSLRMLAKGVIRKIVDWEESRSFFYKRLRRRISEDVLAKEIRSVIGVESSHKSAMELIKKWYLASETAGGSTEWDDDDAFVAWRENPENYKEHIKELRAQRVSQVLSDVADSSSDLQALPQGLSMLLDKMDPSRRAEFIEEVKKVLK

SEQ ID NO: 967 - DNA, 20147 bp, Panicum virgatum
  source 1..20147: mol_type = genomic DNA
gccgatgcgggccgcgaaattattattttaggccgcacaccccccatccctccgccctcctggttcgcccccacccctcgggatatccgcctcgcctccactccgcccggcgcctcctccccgtccttcctcctctgctccgcccagccgtcgcaaggatccaacccccgcgcgtcgccttctccgcagcctccccctttcttcccgaggtatgagctctcctgccgctccgctatttatttgtcctgctcgtcaccagcgccgctccctctgtcggagcgcagcggagctcgccagatccgcgcgccgcacgccgatcagcgacatcgccggtgagaccgcgcgctgtcattgctcttcccgttgcggtgggatggggtggttggtctggctgagtagtgggtttatggctggattcgtcagcacgggcaggggttttgcacccggctgggctgaatcctatgaattccatacgggaatgggaggctgaccggagtgggtgatggattcgggctctatagttgattcgagctgctgcgaaggtgaaatgtaggttgtctctccttgcaggatgaaggggtagcctctggctgactctgctagtttccagtgttgcaggctgtggtctagtcagtgatgcccgtgccgatgctagattgctagctgccgttctgctggtacttggtatgagtggctttaaggtttaaggtgtagtactagctgtctgatgaattaaggtttaagcactcttttttccatgtgggcaggtaagttatgcgcatggctttgttgcttgttcattttgtgctatgtgtcaatgtttatattctgggtagtcggtactgttccattgcacctttggtggttggtagtttcgtatcttttctttttccctggttatctactactcacatgcaattcgtgcctacttttgtgtgtcatatttactttaatttctttttgctgcatgttaaatctaaaaataaagtgtcgtcgcatcagtatgttgtgcatggaaatggagtgttacctacactttttggaaaaaaaagaaagcaatccactctgagatggaatgaacatttagtatgaaaacttgatttaccttctctggaatgaatactccaaatgtataacaatatctatatacttcatacccattaactgcatttactttctctaaacatctcctcacaagctgcctcatcagctcgattattctgtccgtctgatgcaactttgtgctagtcttctctccactgtaagcatgtctccccgactcttctcttccacatccatcatataactgacgatgaacccaatggtccatgattttcaacaaagagattgctctcttggatttccatatagtctccaaaagtgcaccattatatctatatgagcaactaaacagccattatctggctacacagttcatccgtttatgtgcgcaactgaacatgcactgtccttccacctcccaatcttctcagaggtcaccaataagctagataagatctcaacatagtaggtgcccattagggatgcaagtgggtacccaatggtgttttatgggtcaactaaataattacgatggcatgccatcggccatcctagttcatttctcctcctaaattaattacgcatatgccatcctatttcattctatcaaagttttgggtcgacccaatgacccaaaatatatataacttgcatccctagtgcccatagctttcaaaatgagagggtttctaaaacatcactaaaaacatggacatggtgggtgctggataaactttacctttcttgactctgaaataggttttactagcccagtgacctataaactctaatctttcttttattttctttgatattctaacttcctaagagtattctgctatagagcactgatgaagttgttgtgcattgacataacaaataactttctcattggcttctatcagatttccaggagttttccctctggtttaatggcactgtgcctttgagaaaatctttaattgtgctgtctgggctgcggaacgacaatgtcgcaacttggattagctgcagctgcctcaaaggtgcttccactactccctaatcgccagaggagttcagctggaaccacattcacatctggatcatcgaggccctcaaaccgaaggaaaagctgcactcgttcacttcgtgatggaggagatggggtatctgatgccaaaaagcacaaccagtctgttcgtcaaggtactgtgagatattttttttttctgattcaagctaaaattttgcttccatctagatatgaatgaagtttttcttgcatgatattgtttaatattgtaatgttacagcctcaataatatgtgtgacataaaaatggtagctgtggaagttgctctgataaaacagtactgcagcaagaccataatcttttctttttccgataagcaagagtaacttttaaatattcaatatgatgttcttgtaactgcatatacggtaatgctattctacacccaccttctattactagcaaaaataatcttttttgtcagtgaaatatgcacagaaaattagattatagttgctagggtattaacgtagatgtgctcagtctcaaatgtttgtcttcatgcaggtcttgctggcatcatcgacctcccaaatgaggcaacatcggaagtggatatttcacagtacgtactttgacattttacagttttattacatgtttattttggaaaatattctgcagcttatttatactaatttcctcattactacttgtcttagtgttgctctgtgctgaaatattgtagtaccacacacctcaatgttatcatagtaaatgattcaaaatatgtgctgtcctgttgcagtttgtaacacagtcagggacctgtttctgtatctgctatttagagcataatgaatacgctcactcatatgatgcagtctaggtcattgttatgaccctagttcataatgggggtaaacatctgccgggaagatagccggacggcaacggctgattaggttgggattggatctagactggggagatgaattggggattgggactagattgatttctcataattcttgcttgccttgaatgacatatcttctctctttatatagagagggtttcttgacccctaagtaagacctaatctgatccctaaacctaaccctaatgggcctgcctagacggcccataagacctctgactgcccatgacattactcccctctttttgagcagctcgtcctcgagccgcaacacaccctgcttatagagacgacacaactttttataaattgaacacctaaaaaataagccttttacatctctacttattttcttatttcctattaagacacaaactaatttgaaagattcgatttgcggagctctcccgaatttaggtggaccccatcttgacgcatgcagagagagaaggcagaagcacctccatccatgcgccatcaacccctcctggtaactcgcatgcaacccgcaattaggcgtgtatgcagcaacagatccccccaggaagcattcacatgcagcaaacacagcaactcttggctcccgtggaaactgcagacttgtgagctgcacgtgaactgctgtgtcatgaaatatgtggcagcccaccggccaaacatcagcttttttggcccaccacaagcccagcttcgtgtctctccccacggggaaggcaagctccgtcgccccgttcattgccgcaatctgcggccgagaagatgcactggaaacctgcaagctagagcggaagggcggcggcacgcggtgactcgaagaagccctccacggctgctagcggaggcgacctcacagaggccatcggtggcggcggcctagcatcgaccagcatcgtgcgcttgcaggcagcagaccgcggaggcgactttgctgtggcaggcgccgagggcgccatgggcggccggttcgtggccacaggcgcctagctgacggtgccttcggtctgatgaagcggaggtgtagtcgccccacgcggacgcggaaggacgtctgcagcggcggcggtagctgatgatgctgtagcggcggcgaccccattaggccatcacccgcagaccctttttgctttgctgacgaagactcagaagagcggtcgccggcctccatgcgcttcaccgcgacgctgactgactctagatgagtgcgagcttccttcatcgtcttttgcagagcatctaccgaagtgggcagagccaccaaggccgacacgctaggcaccagcggagcaagggcagacaccgtggcgtccatcttctccatgagcgccttgagatcagtcatggacttctggagatcttccatcggatcagagcccgagctatctgataccagttgttatgaacctagttcataacgggggtaaacatccgccgggaagatagccggacggcaacggctgattaggttgggattggatctagactggggagacgaattggggattgggactagattgatttcttataattcttgcttgccttgaatgacatctcctctccttatatagagagggtttcttgacccctaagtaagacctaatctgatccctaaacctaaccctaatgggcctgcccagccggcccataagacctcggactgccaatgacattactcccctctttttgagcagctcgtcctcgagctgcaacacaccctgcttatagagacgacaactttttataaattgaacacctaaaaaataagccttttacatctctacttattttcttatttcctattaagacacaaactaatttgaaagattcgatttgcggagctctcccgaatttaggtggaccccatcctgacgcttgcagagagagaaggcagaagcacctccatccatgcgccatcaacccctcctggtaactcgcatgcaacccgcaattaggcgtgtatgcagcaacagatccccccggaagcattcacatgcagcaaacacagcaactcttggctcccgtggaaactgcagacttgtgggctgcacgtgaacttctgtgtcatgaaatatgtggcagcccaccggccaaacatcagctattttggcccaccacaagcccagcttcgtgtctctccccatggggaaggcaagcttcatcgccccgttcattgtcgcaatctgcggccgagaagatgcactggaaacctgcaagctggagcggaagggcggcggcacgcggtgactcgaagaagccctccagggctgccagcggaggcgaccacacaaaggccatcagtggcggcggcctagcatcgaccagcatcgtgcgcttgcaggcagcagaccgcggaggcgaccttgctgcggccggcgctgtgggcgccatgggcggccggttcgtggccacaggcgcctagctgacggtgccttcggtctgacgaagcggaggtgtagtccccccacgcggacgcggaaggacgtctgcagcggcggcggtagccgatgatgctgcagcggcggcgcccccattaggccattacccgcagaccctttttgctttgctgacgaagactcagaagagcggtcgccggcctccatgcgcttcagcgcgacgctgactgactctagatgagtgcgagcttccttcatcgtcttttgtagagcatctaccgaagtgggcagagtcaccaaggcagacacgctaggcaccagcggagcaagggcagacaccgtggcgtccatcttctccatgagcgccttgagatcagtcatggacttctggagatcttccatcggatcagagcccgagctatctgataccagttgttatgaacctagttcataacgggggtaaacatccgccgggaagatagccggacggcaacgactgattaggttgggattggatctagactggggagacgaattggggattgggactagattgatttctcataattcttccttgccttgaatgacatatctcctctctttatatagagagggtttcttgacccctaagtaagacctaatctgatccctaaacctaaccctaatgggcctgcccagctggcccataagacctccgactgcccatgacagtcaccccgattccgacatgcgtgtcggacatgatacgtgtcggacacgacgattcgtcattttcctaaaaacagcgacactgtgatacgtaagataaaataaaataaaaaaatagcaatcaacagcacataaagcaaagtaaaatatgctcctttctctcttcctatttctcttccccggctctctcctcctttactcattttctcctccctgctctgctctttgctctctccctctccgccgcgtgcccctccctctcccttccctctcccgtggtggcgccccctccctctcccgcgcccctccctatcccttccctctccggtgcgcggcagggcagcggccgtggcggggccaaggtgccggcggtgccgtgggcggaggagacggaaacggcgaggaggcaggggcggaaagcggctgtgggcgcggcggaggtggaggaagccggcggatctcggctcgcccgcctcctcacggatgcggcggcggaggcccgcgcggcgggcgcagcatggcggcacggcggaggacacggggaggcggcggcctgaagagaggcggcggcgtgtcgatctgtggagacgcggcaagctggctcccggcggcgccggcatcgatctaggggaggaggcgaggagcgacggcggcgtgcggaacagagaggaggcggtggctcgagtgcttattgggccgggctgtgtcggggacgcgtcggcgatgcgtcggcgaggtgttggaaattgaaaatatattttttaaatgtttaatccgccgatactccttcgttacgtattggagacgtatcggggacgtatcggtgtcggacacggtgtccgacaccaacacgggacttcagtgaagtgtcggggtaacagaggatgcagttacagctcatgctgtagaactactttcagaattgctggagtgcagacaattatgaaatcatatctgcatacatctttctcagacttttcttctatgtaattgattgactgtaactgtacatatatgatagatacattgcctatttgaactttgttgatttattgaaaccatgcatattgtaagcattctgaacacaacaataatcctttccttttgtccttttgcagtggatctgaggatcccagggggccagcagagtcttatcaaatgaatgggattataaatgaagcacataacggtagacatgcctcagtgtccaaggttgttgaattttgtacggcgttaggtggaaaaacaccaattcacagtatattagtggccaacaatggaatggcagcagcaaagttcatgaggagtgtccggacatgggctaatgatacttttggatcggagaaggcaattcagctcatagctatggcaactccagaagacatgaggataaatgcagaacacattaggattgctgatcaatttgtagaggtgcctggtggaacaaataataacaactatgcaaatgttcaactcatagtggaggttagagctgctaatcttttggtttactactgatccacagttcctttcttctttggtaaccattggcatatttatgtagagattcatatttctcccagctcagctactgtggaagtctaattgttaccattaaaactatggacttttgatattgcagatagcagaaagagtaggtgtttctgctgtttggcctggttggggacatgcttctgagaatcctgaactgccagatgcattgactgcaaaaggaatcgtttttcttgggccacctgcatcatcaatgaatgcattgggagataaggttggttcagctctcattgctcaggcagccggggtcccgactctttcgtggagtggatcacatgtgagtctcacactctctttgatgactatctgctgatcttacctatattcattttcatattctaatgacactatgtttaggttgaagttccattagagtgctgcttagacgcaatacctgaggagatgtatagaaaagcttgtgttactaccacagaagaagctgttgcgagttgtcaggtggttggttatcctgccatgattaaggcatcttggggaggtggtggtaaaggaataagaaaggttcgttattttgtggcaactatctatgaagagattgtgcacattggagtttggtacggagagctaaccacctttttgacatgattaactcgatttccctggcaggttcataatgatgatgaggttagagcactgtttaagcaagtgcaaggtgaagtccctggctccccaatatttatcatgaggcttgcatcccaggttagttttcctttctggaagttatatttgaccccttatttgttctctctgagttattgctgcaccttctggaagctttgtctaatgcattattgagaaatgaaccaatgaccatcatttctggagatcaacatatttatgagaagttaattgatgggcactgttgaaaaacacaacaactgagtggatagcatactgatagaatcttggaattattgtgttctggttgaaacactgcacttgcttgagttcgactaagctggagagaaacagcatattttgtttccaacactctgtggggaaaatgtttaacccgttttttttggactaccttgaatacacttgtttgcttttcaagattatctctttttattgaactatgctttgtgatacaaccaaaacaagggaaaattggttcgatagcaccgaaacatcattgttttcggaaaataacacttaaagatcgccgtgacgtaaaatacctctgaaagaattatttctgttccgaaaaataccattcggttaattttgcaatgaaccagtcatttttcactcttggacaaagtgaaatgtctcttttaccctcgtctccttcccctgctcgtccttcctcctgcaacgcatccgcccgctcactcctgccttccaatttttaggaggggggccacgccctgactgggtgccgtgatgcgccgtggagcggtggtcgcccttttccgtggtgccgccaaggcgcgcatacctgacgtcgtgcagggtgcgggcattgcccctgtcagctgcgatggtgcagtcggcgcgttgggccaccaccatggacctctctccttccctgctcctttctaccgagctagccagcaattggagcagcagccagcactatgacctccaaggagcagcagtgccgagggagggcacaaggaggagagacgggagtgatttatacaagcagagagacagagaggagagggccgctcggtgggagcttaaaaagaagaggtgggaggagagaacgggacggctgctgtgaagcgagaagagggggaggaggacaaaggagatagaatcacggtggaattaaggggatgtgtgcttgcgggcggaagaaggaagagcagggtaacaagataagggtaatagagacatttcactttgtccaattgagaggaaagtgactgattcattgcaaaagttaatggaatggtattttccagaacagaatcattctttcagtggtattttatgtaacgacgatcttttactggtattttctggaaacaatgatctttcgatgctatggaaccaattttttcccaaaacaacttgttcattctgttcatctggaagcctagaattatgctttgttagctgtagccaacattgtgtttgattctatgtcttgttctctattatagagtcgtcatcttgaagttcagttgctttgtgatcaatatggcaatgtagcagcacttcacagtcgtgattgcagtgtgcaacggcgacaccaaaaggtctgaacccctacctacccacccacatacacaattattgaaccatgcattttgtaatgcaatctatttctcacttgtagttctgttcaatttttttttaacaacagatcattgaggaaggcccagttactgttgctcctcgtgagactgttaaagcacttgagcaggcagcaaggaggcttgctaaggctgtgggttatgttggtgctgctactgttgaatacctttacagcatggagactggagaatactattttctggagcttaatcccagattacaggtttgctctgtttagcattgttatcgattaattaacccgttggaaatcctttataatgttattaagtggtctccatttaggtcgagcatccagtcactgagtggatagctgaagtaaatctgcctgcagctcaagttgcagttggaatgggcatacctctttggcagattccaggtaattaccaatctaacaacttatttagttccttattgttttaatttctaaattgtctccttatacagaaattagacgtttctatggaatggactatggaggagggtatgacctttggaggaaaacagcagctcttgcaacaccatttaattttgatgaagtagattctcaatggccaaagggccattgtgtcgcagttagaattactagcgaggatccggatgatggtttcaaacctactggtggaaaagtgaaggtaacattttgtgatgacagatatatttgtcaaacagattaagtttggtacaatgaccaggtcttgattttttttttcaatttttcaggagataagttttaaaagcaagccaaatgtttgggcctacttctcagtaaaggtaacctgtttgcaactttgttaaactggcacattaactattctacgttgtgcagataattcatatgggactgtttgtttatttaccatttgtctcatttagttaaacaaataattagcactctgactccccatttgtctgttttcagtctggtggaggcattcatgaatttgctgattctcagtttggtatgtgcaaatcaagtgaaacattctttataatttgttttggtcctcatttttgaaagattgcttgtttatttacaggacatgtttttgcatatggactctctagatcagcagcaataacgaacatggctcttgcattaaaagagattcaaattcgtggagaaattcattcaaatgttgattacacagttgatctcttaaatgtaagaagtgttaaccaccttctaaagcctccttttatttttgttggtattatactatcattgtgtttgtttctccattacacctaaactcgtagtgctattttcctatattcattcaggcttcagacttcagagaaaacaagattcatactggttggctcgataccagaatagctatgcgtgttcaagccgagaggcccccatggtatatttcagtggttggaggagctctatatgtaagatgacgaaataacactactcatgcttgcacttatctcaagttactgtgaaaaagataccaatgtttgatctaatttaaatcgttgttatgtcctgcagaaaactgtaaccgccaatgcagccactgtttctgattatgttagttatctcaccaagggccagattccaccaaaggtatgttttttaggatactctggatatttctttaacaggcgattagtagcaaaggtcaaaagaggtgtggggtgtgtttgggtctatgtatgattcttttcttcttgtatcaatacaatgatgcgcagctctcctgcgtgttcgagaaaaaaaaatatttctttaaggtgaagaatgattgaccaataagtcttatatgcagcacatatcccttgtcaactcaacagtaaatctgaatatcgaagggagcaaatacacagtaagtgtgacgttccataagaaaatctatttcagttacaataatgttagccattctgagttttgtctgcattgtgttgtagattgaaactgtaaggactggacatggtagctacagattgcgaatgaatgattcagcaattgaagcgaatgtacaatctctatgtgatggtggcctcttaatgcaggtaccttgttctttcttttatgatttattaaaacatctaatgcatgccttcaaagttatgtcactgtcagttctgattgttgaactgtaatggcttcagctggatggaaatagccatgtaatttatgcggaagaagaagctggtggtacacgacttcagattgatggaaagacgtgcttgttacaggtgcatactctctttctccctctatattgttcttggtgtctgattgggaagcttctgcagttctgctagatttgtctatcatttattactgcattttgtctgtcatcactaacttatctttaaaaaaaaaatcatattgtttgctaacaggatacatcatgttagaaaatttgactaatccttgttgtgaagttacatacttgattctagtgacatttaactgcaatacctgacttaaaaaattactgtatcgatgggcggctgaaaattgagaagatgccttttttatgtaagattttagctgtactatgctatgcctcaagtaggcaatgactgtgttcttgcagaatgatcatgatccatcaaagttattagccgagacaccctgcaaacttcttcggttcttggttgctgatggtgctcatgttgatgccgatgtaccatatgcggaagttgaggttatgaagatgtgcatgcctctcttgtcacctgcttctggtgtcattcatgttatgatgtctgagggccaggcattgcaggttatattcttacatctctgctccgtgcattgtgcttgcatcacataaccgttgcatgtatttctgaacttttgttctgttctaggctggtgatcttatagcaaggctggatcttgatgacccttctgctgtgaaaagagctgaaccatttgatggaatgtttccacaaacgggccttcctgttgctgcctctagtcaagtacacaaaagatatgctgcaagtttgaatgctgctcaaatggtccttgcaggatatgagcataacattagcgaagtaaatattccatcttattgtgattatctttcatttcttttctttgtttatcttgtgtttacttatattatgttttgtgtactccatcccaaatagattgctattctaggctttctagctctgttctaaatccaaccatctttaatttttaccatgtttatacataaaagtactaatatttatgatgccaaataagtatcactagattcatcatgatatatatatttgggacagagagagtatgcttttgtgagttaagggttagcctgggttccttttttagtcctgctaacttttggttacaaactttgtataatctctgaaaaattataatggccagccctatgctgatcatgctcatgttagtgtaactgcaaattttgctacatcaatcattttctttctttcaacaggtttatcttctggtttcataattttcacttgcacttctttcatttgaagtcatttattttggtgtctatctcattaattccttagcatttttttatcacatattgattgattcatttttaactctgcttcttttcaggttgtacaagatctggtatgctgtctggatgatcccgagcttcctttccttcagtgggatgaacttatgtcagttctagcaactaggcttccaagaaaccttaagactgaggtatgggacaattacaactttacaagatatatacaaaagatatagccaatctggcttaaaggaaagatgattcatttttaccatttagattatcttaattcttcatactggcttacgttgatgacagaagtttgctatcaccagagtaaaattatgatattttataacacttgtttgcactgtgttactatgtgctttaaattctgtagttattatgtaaaatttttaaaaattaaaattgtattcatgtgctaaaattcaaagtatttcagtttagcatgttaccagatagaagctgaatctttcagtaagttttgttttgatttcttgattgtagatcttctggtatatcctatatccttttcattagctcttatatttctatctttttattatgcagttagaggataaatacaaggaatacaagttgaacttttaccgtggggaaaacaaggacttcccatccaagctgctgagagacatcattgaggtcagttttagatttcttgtgtggtattgctttttaaactgtttgctaattttaacttttttttgttattgtaggcaaatcttgcttatggttcagagaaggaaaaagctacgaatgagaggcttgttgagcctcttatgagccttctcaagtcgtatgagggtgggagagaaagccatgctcattttgttgtcaagtccctttttgaggagtatcttgctgtggaagaacttttcagtgatgggattcaggttaccaacatatccaaactgaatactgatgagcactaaaaaagcacatagtgttcactcctttccattctcctagttgggagcacattttaacaaatgacgtgtacatgtagctgaaaacttttgcatggcttctgatggaattcactggatacaatcttatttacaatttttctctaattgtgtcttgacagtctgatgtgattgaaaccctgcgtcatcagcacagtaaagacctgcagaaggttgtagacattgtattgtctcaccaggtaattttcttcatgatctgatgtcattatgcaaatgatcactgaacgatttctgttattgaaagtgtgattttgttcatagggtgtgaggaacaaagctaagcttgtaacagcacttatggagaagctggtttatccaaatcctgctgcttacagggatctgctggttcgcttttcttcactcaatcataaaagatattataaggtgcagtgacttaaaataacctagatattcctgttatgattttctatgatattttattttaactaatatcatgcatcttaataaaaacagttggcccttaaagcaagcgaacttcttgaacaaactaaactaagtgaactccgtgcaagcatcgcaagaagcctttctgatctggggatgcataagggagaaatgactattaaagatagcatggaagatttagtctccgccccattgcctgttgaagatgcacttatttctttgtttgattacagtgatccaactgttcagcagaaagtgatcgagacatatatatctcgattgtaccaggtactatgtcaactaacttgatgtctttcatagtcccactgagcacatctggtatgtatatactaagaaatgcactaacgacatgagatgttcatcttttcatttcactaaatgttgagacatggcatactgatgattgactaaaattaattgggtttgcaaagttttgatttactatatgtatagcaactagcaagacatgctggctaacctgcaaatcatatttttcagcctcttcttgtgaaggatagcatccaaatgaaatttaaggaatctggtgcctttgctttatgggaattttctggagggcatcttgatactaaaaatggacaaggggccgttcttgaccgtaagagatggggtgccatggttgttctcaaatcacttgaatctgcaccaacagccattgtagctgccttaaaggattcggcaaagcatgacagctctgagggcaacatgatgcacattgctttattgagtgctgaaaatggaaataatatcaggtctgttcatgtgcaatatcaggttcaatggatcttttgtttgtgatctgtgtaactctaactgatccatctctttcagcagtgatgatcaagctcaacataggatggaaaaacttaccaagatactcaatgatactagtgtcgcaaatgatctccgagctgctggcttgaaggctataagttgcattgttcagagagatgaagcacgcatgccaatgcgccactcattcgtctggtcagatgaaaagtgttgttatgacgaagagcagattctccggcatgtggagcctcccctctctgcgcttcttgaattggtctgtttatcaacattattgcatgttgttttgctacatcctgttcttatgattttcgtgttcttcactatttataacttattttgcctattatgaatacaggataagttgaaagtgaaaggatacaatgaaatgaagtatactccatcacgtgatcgtcagtggcatatctacacactaagaaatactgaaaatcccaaaatgttgcatagggtatttttccgaactattgtcaggcaacccaatgcaggcaacaagtttacatcagcccatattggcgacactgaagtaggaggtcccacagaatctttgtcatttacatcaaatagcatcttaaggtcgttgatgactgctattgaagaattagagcttcacgcgattaggactggtcattctcacatgtatttgtgcatattgaaagaacaaaagcttcttgatctcattcctttctcagggtaagtgtgcacataatccttttttggaaagattcatggctagccatggttggcctcctcaacaaagcttttcattttaatcaggagcacaattgttgatgttggccaagacgaagctactgcctgttcacttttaaaatcaatggctctgaagatacatgaacttgttggtgcacagatgcatcatctttctgtatgccagtgggaggtgaaactcaagctggactgtgatggccctgccagtggcacctggagagttgtaactacaaatgttactagtcacacgtgcatcgttgatgtaagttgtccctactgtttctttattttgcattgcgcacattaaaatataagtcaatatgtggttatattgcaaactatcaccccatttaattatgttctgaagcacatagctcgttttatggttttagatctaccgggaagtggaagatacagaatcgcagaagttagtataccattctgcttcttcatccgctggtcccttgcatggtgtcgcactgaacaatctgtatcaacctttgagtgtcattgatctaaaacgctgctctgctaggaacaacagaactacatattgctatgattttccattggtgagttctctctctctctctctctctctctctctctctctctctctctctctctctctctctctctctctctctcgtgtacttctgtattatagttattacgaaccaaagctgataattgctaaaaaattgtaggcatttgaaactgcactgcagaagtcatggcagtccaatggatccagtgtttctgaaggtagcggaaatagtaaatcttacgtgaaggcaacagagctagtgtttgctgaaaaacatgggtcttggggcactcctattattcctatggagcgtcctgctgggctcaatgacattggcatggtagcttggatcttagagatgtccactcctgaatttccaaatggcaggcagattattgttgtagcaaatgatattactttcagagctggatcatttggcccaagggaagacgcattttttgaagctgtcaccaacctggcctgcgagaggaagcttcctcttatttacttggcagcaaactctggtgctaggattggcattgccgatgaagtgaaatcttgcttccgtgttgggtggtctgatgaaagcagccctgaacgtggatttcagtacatttatctaactgaagaagactatgctcgtattagctcttctgttatagcacataagctgcagctggatagcggtgaaattaggtggattattgactctgttgtgggcaaggaggatgggcttggtgttgagaatatacatggaagtgctgctattgccagtgcttattctagggcatacgaggagacatttacacttacatttgtcactggacggactgtagggataggtgcttatcttgctcgtcttggtatacgttgcatacaacgtcttgaccagcctattattttaactgggttttctgccctgaacaagcttcttgggcgggaagtgtacagctctcacatgcagttgggtggtcctaagatcatggcaaccaatggtgttgtccacttgactgtttcagatgaccttgaaggtgtttacaatatattgaggtggctcagctatgttcctgccaacattggtggacctcttcctattacaaaacctttggatccaccagatagacctgttgcatacatccctgagaacacatgtgatccgcgtgcggctattcgtggtattgatgacagccaagggaaatggttgggtggtatgtttgacaaagacagctttgtggagacattcgaaggatgggcaaaaacagttgttactggcagagcaaagcttggaggaattcctgtaggtgttatagctgtggagacacagaccatgatgcagcttatcccagctgatccaggccagcttgattctcatgagcgatctgttcctcgtgctggacaagtgtggttcccagattctgcaaccaagactgctcaggcattgttggacttcaaccgtgaaggattgcctctgttcatcctggctaactggagaggtttctctggtggacaaagagatctatttgaaggaattcttcaggctgggtcaacaattgttgagaaccttaggacatataatcagcctgcatttgtctacattcctatggctggagagctacgtggtggagcttgggttgttgttgatagcaaaataaatccagaccgaattgagtgttatgctgagaggactgcgaaaggcaatgttcttgaacctcaagggttaattgaaatcaagttcaggtcagaggaactccaagattgtatgggtaggcttgacccagagttaataaatctgaaagcaaaactccaaggtgcaaagcttggaaatggaagtctactggacatagaatcccttcagaagagtatagaagctcgtacaaaacagttgttgcctttatatacgcagattgcaatacggtttgctgaattgcatgatacttccctcagaatggcagctaaaggtgtgattaaaaaagttgttgattgggaagaatcacgttctttcttctacaaaaggctacggaggaggatctccgaagatgttcttgcaaaagaaataagaggaatagctggtgaccacttcactcaccaatcagcagttgagctgatcaaggaatggtacttggcttctcaaggcacaacaggaagcactgaatgggatgatgatgatgcttttgttgcctggaaggacaaccctgaaaactacaagggatatatccaaaagctacgggctcagaaagtgtctcagtcgctctccaatcttgcggactccagttcagatctagaagcattctcccagggtctttctacactattagataaggtaagcttgctctctactgattgtaccagtaccaattattaattgtgtttaacttgggttccacctggtgctatctgctgcatctatcttcttcagagttcctatttcgtttgtatattgctagacactgcgtcttgccaaatcatggttctaatacatacagctattttgtgtaaacatttccatcgtctcacatgttcctttggatgctccttcagatggatccctctcagagagccaagttggttcaggaagtcaagaaggtccttggttgatgaaatgataagaacacatccaatataatgtgtatgctacatgttttttgatgaagtacatacatagaaggatattggtcagccttgattgatcatttctgatctgaattgaccatttctgatcctgtggttgatgtaaacgcaaagcttggggcagccgattgacagttagcaagggcacaagtgaatctgtgctctagttttgcagtggtcgaggaaggcacaaagttgtttcgctgtagttctgtaatgtaaccagggtttcaattctgtaattttagggtgtatcttggggatactagcaaacagttgagtggttcattgaattttgtacttgaataatatgttttgtaggcatgtgtactctacgtgaaataaatgtgaatttgctagtgtaagaaccgcccaacttgacactgctttagtcatgatactagaaacctggcgcggctttgccgtgcacccttcgtgga

SEQ ID NO: 968 - protein, 2321 aa, Panicum virgatum
MSQLGLAAAASKVLPLLPNRQRSSAGTTFTSGSSRPSNRRKSCTRSLRDGGDGVSDAKKHNQSVRQGLAGIIDLPNEATSEVDISHGSEDPRGPAESYQMNGIINEAHNGRHASVSKVVEFCTALGGKTPIHSILVANNGMAAAKFMRSVRTWANDTFGSEKAIQLIAMATPEDMRINAEHIRIADQFVEVPGGTNNNNYANVQLIVEIAERVGVSAVWPGWGHASENPELPDALTAKGIVFLGPPASSMNALGDKVGSALIAQAAGVPTLSWSGSHVEVPLECCLDAIPEEMYRKACVTTTEEAVASCQVVGYPAMIKASWGGGGKGIRKVHNDDEVRALFKQVQGEVPGSPIFIMRLASQSRHLEVQLLCDQYGNVAALHSRDCSVQRRHQKIIEEGPVTVAPRETVKALEQAARRLAKAVGYVGAATVEYLYSMETGEYYFLELNPRLQVEHPVTEWIAEVNLPAAQVAVGMGIPLWQIPEIRRFYGMDYGGGYDLWRKTAALATPFNFDEVDSQWPKGHCVAVRITSEDPDDGFKPTGGKVKEISFKSKPNVWAYFSVKSGGGIHEFADSQFGHVFAYGLSRSAAITNMALALKEIQIRGEIHSNVDYTVDLLNASDFRENKIHTGWLDTRIAMRVQAERPPWYISVVGGALYKTVTANAATVSDYVSYLTKGQIPPKHISLVNSTVNLNIEGSKYTIETVRTGHGSYRLRMNDSAIEANVQSLCDGGLLMQLDGNSHVIYAEEEAGGTRLQIDGKTCLLQNDHDPSKLLAETPCKLLRFLVADGAHVDADVPYAEVEVMKMCMPLLSPASGVIHVMMSEGQALQAGDLIARLDLDDPSAVKRAEPFDGMFPQTGLPVAASSQVHKRYAASLNAAQMVLAGYEHNISEVVQDLVCCLDDPELPFLQWDELMSVLATRLPRNLKTELEDKYKEYKLNFYRGENKDFPSKLLRDIIEANLAYGSEKEKATNERLVEPLMSLLKSYEGGRESHAHFVVKSLFEEYLAVEELFSDGIQSDVIETLRHQHSKDLQKVVDIVLSHQGVRNKAKLVTALMEKLVYPNPAAYRDLLVRFSSLNHKRYYKLALKASELLEQTKLSELRASIARSLSDLGMHKGEMTIKDSMEDLVSAPLPVEDALISLFDYSDPTVQQKVIETYISRLYQPLLVKDSIQMKFKESGAFALWEFSGGHLDTKNGQGAVLDRKRWGAMVVLKSLESAPTAIVAALKDSAKHDSSEGNMMHIALLSAENGNNISSDDQAQHRMEKLTKILNDTSVANDLRAAGLKAISCIVQRDEARMPMRHSFVWSDEKCCYDEEQILRHVEPPLSALLELDKLKVKGYNEMKYTPSRDRQWHIYTLRNTENPKMLHRVFFRTIVRQPNAGNKFTSAHIGDTEVGGPTESLSFTSNSILRSLMTAIEELELHAIRTGHSHMYLCILKEQKLLDLIPFSGSTIVDVGQDEATACSLLKSMALKIHELVGAQMHHLSVCQWEVKLKLDCDGPASGTWRVVTTNVTSHTCIVDIYREVEDTESQKLVYHSASSSAGPLHGVALNNLYQPLSVIDLKRCSARNNRTTYCYDFPLAFETALQKSWQSNGSSVSEGSGNSKSYVKATELVFAEKHGSWGTPIIPMERPAGLNDIGMVAWILEMSTPEFPNGRQIIVVANDITFRAGSFGPREDAFFEAVTNLACERKLPLIYLAANSGARIGIADEVKSCFRVGWSDESSPERGFQYIYLTEEDYARISSSVIAHKLQLDSGEIRWIIDSVVGKEDGLGVENIHGSAAIASAYSRAYEETFTLTFVTGRTVGIGAYLARLGIRCIQRLDQPIILTGFSALNKLLGREVYSSHMQLGGPKIMATNGVVHLTVSDDLEGVYNILRWLSYVPANIGGPLPITKPLDPPDRPVAYIPENTCDPRAAIRGIDDSQGKWLGGMFDKDSFVETFEGWAKTVVTGRAKLGGIPVGVIAVETQTMMQLIPADPGQLDSHERSVPRAGQVWFPDSATKTAQALLDFNREGLPLFILANWRGFSGGQRDLFEGILQAGSTIVENLRTYNQPAFVYIPMAGELRGGAWVVVDSKINPDRIECYAERTAKGNVLEPQGLIEIKFRSEELQDCMGRLDPELINLKAKLQGAKLGNGSLLDIESLQKSIEARTKQLLPLYTQIAIRFAELHDTSLRMAAKGVIKKVVDWEESRSFFYKRLRRRISEDVLAKEIRGIAGDHFTHQSAVELIKEWYLASQGTTGSTEWDDDDAFVAWKDNPENYKGYIQKLRAQKVSQSLSNLADSSSDLEAFSQGLSTLLDKMDPSQRAKLVQEVKKVLG

SEQ ID NO: 969 - DNA, 14034 bp, Avena sativa
  source 1..14034: mol_type = genomic DNA
accccctctcggtctcgggatatccgcccgcccgcgctcgctcgctccactctccccgcccccctccggcaccacgccgccgcaagatccaaagcccagccgcggcaggacgtcactctcgaagcacccgcgcgcgtcggcacgtccgcctccccgaggtgcgcgccctactccgctatttatttatgccctcccctcccccgccattccactgtcgcgccccagatccgccgtccgatctgcctccgctcccggaggtgaggacagccgccaccgctcctctcatatgctattgctgtgttttgtgcgcgccgggccggggccgttcgtccgcggctttcgttcgtgggggtggcggggaggggtttaagggtactgtgctgcgcgggacctggggttagtgcgctctgtgtttgaaactcggccgagcttgggattggattgttgggagctcgcggtggcatgcttaggtagtggcgatagtcaggagaatgctgaaatgcggctcgcctactgtatcaatgcgaggtactagtgatcattggccggtcgaaggtgccctgtgcctagcattgtctttctcaggctggttcctctgtgcttccgtggaacatatccatgctaagcgcaagctgcctgcgatggtacaccatggcagtgcagtagacgaggagtgcgctggtgctgccaatgataggtttatgttcttagtttcctgttaggagggtattaatgctacccactgtagtatgacactgagctacctaccttggtttttggtaataaagtttgggtttcctgtttcattggagaattgcattccttgcctattttagtccagagcatcttggatgtttgaacttaccgagagaggccgtgaattaatccatgaagtttcctgttgcgtcactctatggactaatgatttctgtgtgcatgcatctgtcaggtttccatacctggggtttacgcactcggtttatggcactgtgcatctgaagaacactgcaactgtgctgtctgtccagagggagaacaatgggatccacacatttgcccattgttggatttaatgcctccacaacaccatcgctatccactcttcgccaggtaaattcagctggtgctgcattccaatcttctgccccttcaaggacctccaagaagaaaagtcgacgtgttaagtcaataagggatgatggcgatggaggcgtgtcagaccctgcagggcataataagtctattcgccaaggtaacccgaggaccatctcctttctaatttgtggtcaatctcagacctgcatagaaaatttgcttgaccgagagcatgcttattttagtgtaagatatcccaatagtgttatcacaaaatgatagataggatatagatcactacagcaatcttcatagattcttatgcccaagttgacatgctgagctgtctgatgtctccgcattgagattcacgaatgaattgggaaaatcaagattagatcagatagctagcacaatcgacttagacataataaaatctctgtcaacttaggtgtagatggactctattttaatattcaatatgatgtttcctcaagggaaagtggacacgaaaatacatgtattatactgcaatttaagtacacatgactgaatgttttgattataataggtctggaaaagtatagaaagattttctgatgaatttagttgcacaaataacaataacatcaaaaagttgggaaaccactgcttcttcttaactattgtgtaggcttgctcagtttccaatgcatatctggatgtaggtctcgctggcatcatcgacctcccaaaggaaggtgcatcagctccagaagtggacatttcacagtaagtacttcagcacactttatagtttagttctgatagaacagtgaaagatgtataacgcatttgtaattcctggatttcacttgtcttattatgggtacacttaaatgttgaagttggaatttcgttattatcttagattacacttctatacatcatagttatacactatgcacctgctgtgagttctggaaattgaacctttgtcatgtggcgcactttaatctgtaaggttttatttttgatatagtatagttataaatcatgtgcaatctctcccgtctataccattatttatgtaagatataatccatatttggtgtgatttctctttacaagttgtgaaacttgtgttcaactttgtaaagggaaatatcccccaacatatatttacctgttctagtggttacagcccaggcacatggctgttgccttgcatggagttttattgggcacttaaaaacatttcatgggaaagactttcatataagtattgtttaaatttaattgccaactgaaacccgtacccgaatgacaagatgaaaaagcccacctgtgtttctgattcatactaggcaatactatgtcatgtgttatgggaccacagtaatgacgttgctctttcttttatagtgggccggaagaccacatgggctcctaccaaatgaatgggatactgaatgaatcacataacgggaggcacgcctctctgtccaaggttgttgaattttgtatggcattgggtggaaaaacaccaattcacagtgtattagtcgccaacaatggaatggcagcggctaagttcatgcggagtgtccggacatgggctaatgatacatttgggtcagagaaggcgattcagttgatagctatggcaactccggaagacatgagaataaacgcagagcacattagaattgctgatcaatttgttgaagtacctggcggaacaaacaataacaactatgcaaatgtccaactcatagttgaggtcagtactgatcatcccttgatgtgcaatttatgtatgagttcctctttgttcttttagcatgacatggcaacttcacttttgcagatagcagagagaacaggtgtttctgccgtttggcctggttggggccatgcatctgagaatcctgaacttccagatgcactaactgcaaaaggaattgtttttcttgggccaccagcatcatcaatgaacgcactaggtgacaaggttggttcagctctcattgctcaagcagcaggggttcctactcttgcttggagtggatcacatgtaagcctcacattctctgtgataactcgtcgcctgatatttgtagtggatgcattttataacatgatggcactttattataggtggaaattccattagaactttgtttggactcgatacctgaggagatgtataggaaagcttgtgttactaccgcagatgaagcagttgcaagttgtcagatgattggttatcctgccatgatcaaggcatcctggggtggtggtggtaaagggattagaaaggtacattattcatttgattggactgtacttgagttctgtgcgcagtgttagccctaaccctttttaacatattattaactagatatctcttgcaggttaataatgatgatgaggttaaagcactgtttaagcaagtacagggtgaagttcctggctccccaatatttatcatgagacttgcatctcaggttagacttctggaatttctgttttctaagcatgctgtttctgaattgtatattgtatgtctggaagcttcatttgcctcttccttgcaggctagaattgtattgtgtaatctgtactcaatggtaattttcattttaatccctctcctctttccttttgtagagtcgacatcttgaagtccagctgctttgtgatcaatatggcaatgtagcagcacttcacagtcgtgattgcagtgtgcaacgacgacaccaaaaggtatgctgctccagattgaaatcattgctttcatttgtggtctgcttacctgaagttttgatcaaatggttcaactgggtccattttgttttgtttataacagataattgaggaaggaccagttactgttgctcctcgtgagacggtgaaagagctagagcaagcagcaaggaggcttgctaaggctgtgggttatgttggtgctgctactgttgaatatctctacagcatggagactggcgaatactattttctggagcttaatccacggttgcaggtttgttcctttgaacactcttcaggacttatattttgttggcagtcgtttatatcgttaaatgttctacattcaggttgagcaccccgtcactgagtggatagctgaagtcaatttgcctgcagctcaagttgcagttggaatgggtatacccctttggcaggttccaggtaataataatatcatcgtaaatttacagtttctgtcccatgatatttctgtatctaactatcttcttatacagagatccgacgtttctacggaatggacaatggaggtggctatgacatttggaggaaaacagcagctcttgctactccattcaactttgatgaagtagattctcaatggccaaaggggcattgtgtagcagttcggataactagtgaaaatccagatgatggattcaagcctactggtggaaaagtaaaggtgagatttcttaatgtgatatctatgtttcaagcacactagggttagtaaactaacctgatcttaattttttcgtgtatttcaggagataagttttaaaagtaagccaaatgtctggggatatttctcagttaaggtaagctgttcatagctctgttgcagtgtcatgttccgagtttccacagaaaattggtctgcaagactttttattcgaaccagtattctcagttgggttttgactaagtattgatccaatcaacaaatgttttctcccccttcatctgttttcagtctggtggaggcattcatgaatttgcggattctcagtttggtatgtaaaatttgacccagtgaatattcctctttgctttttgtatttccttacagtgaaattgctcctttcattgcaggacatgtttttgcctatggggtgactagatcagcagcaataaccaacatgtctcttgcattaaaagagattcaaattcgcggagaaattcatacaaatgttgattacacggttgatctcttgaatgtaagtaatagtaacttgttgaatcctacttttgatgtaatacaaccattttacatccggctttccttcaaaataatcccatgctgtgtttcctgtatcattaattcaggccccagacttcagggaaaacacgattcatactggctggctggataccagaatagctatgcgtgttcaagctgagaggcctccctggtatatttcagtggttggaggagctctatatgtaagataaagaaactatgttaatgttactgcaacttttggtaacccaattacggaaaacacaactatagtgtttaattgaaatcattgttttgtgctgtagaaaacaataaccaccaacgcggacaccgtttctgaatatgttagctatctcatcaagggtcagattccaccaaaggtagtttcttactgggcttaaactctgtatattgcttgaaggtgaacattgttgaccattgtttttgtgcagcacatatcccttgttcattcaactatttctttgaatatagaggaaagcaaatatacagtaagtgtgacattccttaaagaaagactctcagttataatgaaatgatagctattactgatgctcatgtacaccatgtcacagattgagattgtgaggagtggacagggtagctacagattgagaatgaatggttcacttattgaagcaaatgtacaaacattatgtgacggtggccttttaatgcaggtaccttctttcttttatacttgcacataaatataattcaagtttgtaaagtacttctgaaagagttctgattccttagttctaatgtctccagctggatggaaacagccatgttatttatgctgaagaagaagcgggtggtacacggcttcttattgatggaaagacatgcttgttacaggtaaggttttttttatttgttcctttattcataatgttagtgtctaatgacaggactttgtattcctattcgtgatactgcattcaccttttgaccattagcacttcattttgaaaagaaaagataagtcggtattatgaactaatggttggtacaacatgatgtttttcgagatctattctgtgtcaaaatgtaaaggtcactgcttaagcagccagacacaccaggtgatattaaactttaccgagagcaggtcttgtgatttataaagacaagttacataactgcaatgttctgttatattgcttctgattctcaaatctagttataccaacgacactgtatttttaataatcactaatttatcataataagatgcaaaaaaagttagaaggtgtcctactcctacaacactgtcacgtctgatcaaatcatctttgtgatataaaagaacagttgaatacttttatgtttttcttgcaccaatacgttatgattcttgatcatgctgcattgtatcctcaactaaataaatgacaaatcgttttgcagaatgatcatgatccgtcaaggttattagctgagacaccctgcaaacttcttcgtttcttgattgccgatggtgctcatgttgatgctgatgtaccatatgcggaagttgaggttatgaagatgtgcatgcccctcttgtctcctgctgctggtgtcattaatgttttgttgtctgagggccaggcgatgcaggttatattgctgcactttcatttcttcggctgttaataaccattgcatgtgaagcatctgaacttaatattcttttcaggctggtgatcttatagcaagacttgatctcgatgacccttcagctgtgaagagagctgaaccattagaaggatcttttccagaactgagccttcctattgctgcttctggccaagttcacaaaagatgtgctgcaagtttgaatgctgctcgaatggtccttgcaggatatgaccatgcagtcaacaaagtaaacatcaagacccctacagcaactatgtttctattattttgtctcatgtttcctttttttctcaaataccatttattattattacgaattctggattattcttagttcctcattggcattttctgccttttgctaccaaatggtttctaatgtcgagaagttcttggtgcttgtctttgcaaatcttgattttaatgcttttctcttatgttcaccatactcactgatgatataggccctatttatccttgtgatatttttttctccctgtaaatcatgatagagatgctctttctcttatgttcatcatgctcagtattttttattatatagatcgtatttttccttgtgctatttttctttctttcagtaactgatgtttacagatcaaactttgtaccttgttgtaatttatagtctaagatcagcatttgattaccttttccattgtactgggcttcttttttaggttgtacaagatttggtatggtgcctagatacacctgagcttcctttcctacaatgggaagagcttatgtctgttttagcaactagacttccaagacgtcttaagagtgaggtatgtgataattgatatgatatgcagaatctggcatgaagagatgttgatacatttaatttatgatatactccctccgttccaaattataagttgttttagctatttcattatggtctactacatacggaccaaaatgagtgaacctacacactaaaaggtgtctagatacatgcatttttcagaaaaaagctaaaacatcttataatttgaaacggagggactatatagaaggttcttggccctgaactaaaagatcatgtcacttaataagatttacattgttcaatcaccttggttattttcctcaacttattatgcaacttttagctttattctaataatgtaatcaaaattcagaatatttcacttcaattcttcgtagcatgaaacatgtggtactctgtctcatttatttgcactgtacgttgtttattgatcttctgcctcaaccgtttctaatttctatgcatccagttggagggtaaatacagtgaatataagttaaatgttgaccatgtgaagatcaaggatttccccaccgacatgcttagaaagacaattgaggtcagtttttggtttcttatggtaccccagtataagtcgtactactttttgtaacaagttttcttttaggaaaatcttgcatatgtttctgagaaggaaatggtgacaattgagaggcttgttgatcctctgatgagtctactgaagtcatatgagggtgggagagaaagccatgcccactttattgtcaagtcccttttcgaggagtatctctcggttgaggaactattcagtgatggcattcaggttatcttacatttcaaaactaagcagatctactagttcattttaagggtcattcttttcccttcttttagttttgaacatgtacgaattgatgccacacacatgttatagattgcatcagaacctgttgggtaattaagtagcaaataaattgtacatggcttaagacttatttccttcaaaacacttttcactaatcgttttcctcaaaatatgccattttgtagtccgatgtgattgaacgcctgcgcctacaatatagtaaagacctccagaaggttgtagacattgttttgtctcaccaggtaaattactttttggcctaatgacttggcgcaagtgatcactgacgcaatcttcgtcactgattgtttgattttgttctagggtgtgagaagcaaaaccaagctgatactcacgctcatggagaaactggtctatccaaaccctgctgcctatagggatcagctgattcgcttttcttccctcaaccataaaagatattacaaggtagcagtggtgacctaaaataatggaagctttttgaataattctgttgtgatatcttaggctaatgaattaatttcattgtaataacgcagctggcccttaaagctagtgaacttctcgaacaaaccaagctcagtgaactccgcacaagcattgtaaggaacctttcagcgctggagatgtttactgaagaaagggcaggtttctcgttgcaagagaagaaattggccattaatgagagcatgggagatttagtcagtgccccactgccagttgaagatgcacttatttctttgtttgattgtattgatcaaactcttcagcagagagtgatcgagacgtacatatctcgattataccaggtatgttttggattttatcatactcaacatttctggaatcatacactaaagttcctaatgaaataagatgctcagagtttgtttaaaacaaattataaataatctaggtgtgggaacatttgatttagaacttcttgtggacatgttactgatctgtaagttggctaacttgccaatgatattttcagcctcaacttgtgaaggatagtatccagctgaaatatcaggattctgctgttatcgctttatgggaattcaacgaagggcatcctgataatagattgggtgctatggttatcctgaagtctctagaatctgtgtcaacagcaattggagctgctctaaaggatagatcacattatgcaagctctgcgggtaacacagtgcatattgttttgttggatgctgatactcagacaaatgcaactgaagataggtatgttcatgtgcagtattagtgccaatggcttatttggtgcaattcttaaaataagttaacctatttgactatttctttcagtggtgataacgaccaagctcaagacaggatggacaaactttctgtaatactgaaacaagatattgtcacggctgatctacgtgctgctggtatcaaggttattagttgcattgttcaaagagatggagcactcatgcctatgcgccgtaccttcctcttgtctgaagaaaagctttgttatgaggaagagccgattcttcggcatgtggagcctccactttctgcacttcttgagttggtatgtaactcgatcaaactgactgcacgctgtcttgatgcactttaatgctttcattttattatttgctagttgtatttatttagcctgctgtggatacaggataaattgaaagtgaaaggatacaatgagatgaagtatacaccgtcacgtgatcgtcagtggcatatatacacgcttagaaatactgaaaaccccaaaatgttgcacagggtatttttccgaactcttgtcagacagccgagtgctggcaacaggtttatgtcaggccatatcaatgatgttgaagtaggacatgctgaggaatctctttcatttacatcaagcagcatattaagatctttgatgactgctatagaagaattggagcttcacgcgattaggactggtcattctcatatgtacttgtgcatattgaaagagcaaaagcttcttgaccttgttcctgtttcagggtaagcctgcacatcgttatttttgtcgaacatatatgccttgctcttgtgtttcgccatctcaacgagcttttcatcttactcaggaacacagttgtggatgttggccaagatgaagctactgcgtgctctcttatgaaagaaatggctctaaagatacatgaacttgttggtgcaagaatgcatcatctttctgtatgccagtgggaagtgaaacttaagttggacagtgatggacctgccagtggtagctggagagttgtaacaaccaatgtcactagtcacacctgcactgtggatgtaagttttatccctttgcatcttgtttttctgtatgaaactagtgaaactaaagtgaacatatgacaaatatacatggagctatcatcttatttagtttgttgtcatttccacctcatttagacatttacgtctgaagctcatggtgcttttactatttttagatctaccgggaggtcgaagatacagattcacagaagctagtataccactatgctgcatcgtcacctggtcctttgcatggtgtcacattgagtaattcataccagcctttgagcgttattgatctaaaacgatgctctgccaggaacaacagaactacatactgctacgattttccattggttagtatctatctctctgtattatgtcttctgttagcagattcctattggtcttgcatgtcctcctaaaactgataagaactcaaaaatgtaggcatttgaaactgcagtgcggaagtcatgggctaacgtttctagtgaaaacaaccaatgttatgttaaagcaacagagctggtgtttgctgacaagaatgggtcgtggggcactcctatagttcctatgcagcgtgctgctgggctcaatgacatcggtatggttgcgtggatcttggacatgtccactcctgaatttcccagtggcagacagattattgttatcgcaaatgatattacttttagagctggatcatttggcccaagggaagatgcattttttgaagctgttaccaacctggcttgtgagagaaagcttcctcttatctacatggcagcaaactctggtgctcggattggcattgctgatgaagtaaaatcttgcttccgtgttgaatgggttgatcctgccaaccctgaacgtggatttaagtacatttatctgaatgaagaagactatggtcgtattagctcttctgttatagcgcacaagactcagctagatagtggcgaaataaggtgggttatcgattctgttgtgggcaaggaggatggactaggtgtggagaacatacatggaagtgctgctattgccagtgcttattctagggcatacgaggagacatttacacttacatttgtgagtggtcgaacggttggaataggagcctatcttgctcggcttggcatacggtgcatacagcgtattgaccagcccattatcttaactgggttttctgccctgaacaagcttctcgggcgggaagtgtacagctcccacatgcagttgggtggtcccaaaatcatggctacaaatggtgttgtccatctgactgttccagatgaccttgaaggtgtttctaatatattgaggtggctcagttatgttcctgctaacattggtggacctcttcctattacaaaatctttagacccaatagacagacctgttgcatacatccctgagaatacatgtgatcctcgtgcagccatcagtggcattgatgacagccaagggaaatggttgggtggtatgtttgacaaagacagttttgtggagacatttgaaggatgggcaaagacagtagttactggcagagcaaaacttggagggattcctgtgggtgttatagctgtggagacacagaccatgatgcagctggtccctgcagatccaggccagcctgattcccatgagcggtctgttcctcgtgcagggcaagtctggtttccagattcagctaccaagacagcgcaggcaatgttggacttcaaccgtgaaggattacctctgttcatccttgctaactggagaggcttctctggtgggcaaagagacctttttgaaggaattctgcaggctggatcaacaattgttgagaaccttaggacatacaatcagcctgcctttgtatatatccccaaggctgcagagctgcgtggaggggcttgggtcgtgattgatagcaagataaatccagatcgcattgagtgctatgctgagacgactgcaaaaggcaatgttctcgagcctcaagggttgattgagatcaagttcaggtcagaggacctccaagattgcatggataggcttgatccagaattggtaaatctgaaagcaaaactccagggagcaaagcatgaaaatggaagtctatctgatggagaatcccttcagaagagcatagaagctcgaaagaaacagttgcttcctttgtacactcaaattgcggtaaggtttgcggaattgcatgacacttccctcagaatgcttgctaaaggcgtgattaggaaagttgtagactgggaagaatctcggtctttcttctataagagattacggaggaggatatctgaggacgttcttgcaaaggagattagaggtgtaattggtgagaagttttctcacaaatcagcagtcgagttgatcaagaaatggtacatggcttctgaggcagctgaagcaggaagcactgactgggatgatgacgatgcttttgtcgcctggagggagaaccctgaaaactatgaggagcatatcaaagagcttagggctcaaagggtatctcagttgctctcagatgttgcaggctccagttcggatttagaagccttgccgcagggtctttccatgctactagagaaggtacgcatacttacagttttacctgcatctgttttatttgcaagtttctaaaatgttgctatcttcatatatacacttagtatataaccaaacagcgctgctatctttttcatctatcgtatcataccaaataatgtctgagacacttctctttggacacttgttcagatggatccctctaggagagcagagtttattgaggaagtcaagaaggtccttaaatgatcaaatgatagcaacacatccaatacagagtgcatgatatctgtttctcttgaagtacatatatagaaggataatagctaatatgggccaaccattgtttttgtaaacttgttggtggtctatgtcattcaaggcacaacttgcttttggacccaagcctggttgaggagtgtaagtggatgtgttagttctggtgcctgagaagaataggggcaactgggtaacctaccgttggcgagagagctggtgatctagagttcttgttctgtggtggtactgtttccccggtgctgtagttctgtgatgtactatctcctgttcgatgctgtaattctagtcttggaatgtgattgagatgtccattcaattttgaacatgaataatatgttttgtaggcctcatgtgtaccggtatgtggaataaatgttcgttgtgttagcattg

SEQ ID NO: 970 - protein, 2323 aa, Avena sativa
MGSTHLPIVGFNASTTPSLSTLRQVNSAGAAFQSSAPSRTSKKKSRRVKSIRDDGDGGVSDPAGHNKSIRQGLAGIIDLPKEGASAPEVDISHGPEDHMGSYQMNGILNESHNGRHASLSKVVEFCMALGGKTPIHSVLVANNGMAAAKFMRSVRTWANDTFGSEKAIQLIAMATPEDMRINAEHIRIADQFVEVPGGTNNNNYANVQLIVEIAERTGVSAVWPGWGHASENPELPDALTAKGIVFLGPPASSMNALGDKVGSALIAQAAGVPTLAWSGSHVEIPLELCLDSIPEEMYRKACVTTADEAVASCQMIGYPAMIKASWGGGGKGIRKVNNDDEVKALFKQVQGEVPGSPIFIMRLASQSRHLEVQLLCDQYGNVAALHSRDCSVQRRHQKIIEEGPVTVAPRETVKELEQAARRLAKAVGYVGAATVEYLYSMETGEYYFLELNPRLQVEHPVTEWIAEVNLPAAQVAVGMGIPLWQVPEIRRFYGMDNGGGYDIWRKTAALATPFNFDEVDSQWPKGHCVAVRITSENPDDGFKPTGGKVKEISFKSKPNVWGYFSVKSGGGIHEFADSQFGHVFAYGVTRSAAITNMSLALKEIQIRGEIHTNVDYTVDLLNAPDFRENTIHTGWLDTRIAMRVQAERPPWYISVVGGALYKTITTNADTVSEYVSYLIKGQIPPKHISLVHSTISLNIEESKYTIEIVRSGQGSYRLRMNGSLIEANVQTLCDGGLLMQLDGNSHVIYAEEEAGGTRLLIDGKTCLLQNDHDPSRLLAETPCKLLRFLIADGAHVDADVPYAEVEVMKMCMPLLSPAAGVINVLLSEGQAMQAGDLIARLDLDDPSAVKRAEPLEGSFPELSLPIAASGQVHKRCAASLNAARMVLAGYDHAVNKVVQDLVWCLDTPELPFLQWEELMSVLATRLPRRLKSELEGKYSEYKLNVDHVKIKDFPTDMLRKTIEENLAYVSEKEMVTIERLVDPLMSLLKSYEGGRESHAHFIVKSLFEEYLSVEELFSDGIQSDVIERLRLQYSKDLQKVVDIVLSHQGVRSKTKLILTLMEKLVYPNPAAYRDQLIRFSSLNHKRYYKLALKASELLEQTKLSELRTSIVRNLSALEMFTEERAGFSLQEKKLAINESMGDLVSAPLPVEDALISLFDCIDQTLQQRVIETYISRLYQPQLVKDSIQLKYQDSAVIALWEFNEGHPDNRLGAMVILKSLESVSTAIGAALKDRSHYASSAGNTVHIVLLDADTQTNATEDSGDNDQAQDRMDKLSVILKQDIVTADLRAAGIKVISCIVQRDGALMPMRRTFLLSEEKLCYEEEPILRHVEPPLSALLELDKLKVKGYNEMKYTPSRDRQWHIYTLRNTENPKMLHRVFFRTLVRQPSAGNRFMSGHINDVEVGHAEESLSFTSSSILRSLMTAIEELELHAIRTGHSHMYLCILKEQKLLDLVPVSGNTVVDVGQDEATACSLMKEMALKIHELVGARMHHLSVCQWEVKLKLDSDGPASGSWRVVTTNVTSHTCTVDIYREVEDTDSQKLVYHYAASSPGPLHGVTLSNSYQPLSVIDLKRCSARNNRTTYCYDFPLAFETAVRKSWANVSSENNQCYVKATELVFADKNGSWGTPIVPMQRAAGLNDIGMVAWILDMSTPEFPSGRQIIVIANDITFRAGSFGPREDAFFEAVTNLACERKLPLIYMAANSGARIGIADEVKSCFRVEWVDPANPERGFKYIYLNEEDYGRISSSVIAHKTQLDSGEIRWVIDSVVGKEDGLGVENIHGSAAIASAYSRAYEETFTLTFVSGRTVGIGAYLARLGIRCIQRIDQPIILTGFSALNKLLGREVYSSHMQLGGPKIMATNGVVHLTVPDDLEGVSNILRWLSYVPANIGGPLPITKSLDPIDRPVAYIPENTCDPRAAISGIDDSQGKWLGGMFDKDSFVETFEGWAKTVVTGRAKLGGIPVGVIAVETQTMMQLVPADPGQPDSHERSVPRAGQVWFPDSATKTAQAMLDFNREGLPLFILANWRGFSGGQRDLFEGILQAGSTIVENLRTYNQPAFVYIPKAAELRGGAWVVIDSKINPDRIECYAETTAKGNVLEPQGLIEIKFRSEDLQDCMDRLDPELVNLKAKLQGAKHENGSLSDGESLQKSIEARKKQLLPLYTQIAVRFAELHDTSLRMLAKGVIRKVVDWEESRSFFYKRLRRRISEDVLAKEIRGVIGEKFSHKSAVELIKKWYMASEAAEAGSTDWDDDDAFVAWRENPENYEEHIKELRAQRVSQLLSDVAGSSSDLEALPQGLSMLLEKMDPSRRAEFIEEVKKVLK

SEQ ID NO: 971 - DNA, 14674 bp, Avena sativa
  source 1..14674: mol_type = genomic DNA
agagtccagcaggcagcatcggcgccgtccgcgcggtccagctggatccgatctcggccgtccgtacgcgcgcgcgggcccccgctctcgccctcgcgctggcggagtccccgaagccgatacgtgacggaatttattattttaggccgcacagcccccatctctccgtccctctctaccccctctcgggatatccgcccgcccgcgctcgctccactcgccccgccccctccggcaccacgccgccgcaagatccaaagcccagccgcggcaggacgtcactctcgaagcacccgccgcgcgtcggcacgtccgcctccccgaggtgcgcgtcctactccgctatctatttatgccctccccatctccgccattccactgtcgcgccccagatccgccgcccgatctgcctccgctcccggaggtgagaccagctgcccgccgccgccgcccttcttctgctcttgctttgtttccgtgcgcgctgggccggggtggttcgtccggggcttcgttctgtgcgtgggggttggcgaggagggtttaagggtactgtgctgcgcgggacctggggttagtgcgctctgtgtttgaaactcgcccgagcttgggattggattgttcggagcgagctcgcgatgccatgcttaggtagtagccatagtcaggagaatgctgaaatgcggcttgcctactgtatcaatgcgaggtagtgatcattggccggccgaaggtgccctgtcctgtgcctgcctagcattcgttttctcaggctgggttcccccgttcttctgattggaacgtattcatgctaagtgcaacctgcctgcgacgttacaccatccggtgatgtggtcagtcaatgctacctactgtgatattgcgctgcgaatgttaggtgcatgttcttagtttcctgttagcggcgtattaatgctacctactgtagtagtatgccactaagaatgtagacgctacctaccttgttttttggtaataaagtttgggtttcctgtttcattggagaattgcattgcttgcctattttagccttagagtatcttggatgtttcaacttacatttactgagaggtagcgaatttaatccatcaagttcttgttgcatgtctctatggactaatgatttctatgcgcatgcatctgtcaggtttccgtacctggggtttacacactcggtttatggcactgtgcatttgaagaacactgcaactgtgctgtctgtccaaagggaggagaatgggatccacacatttgcccattgttggctttaatgcctccacaacaccatcgctatccactcttcgccaggtaaattcagctggtgctgcattccaatcttctgccccttcaaggacctccaagaagaaaagtcgccgtgttaagtcaataagggatgatggcgatggaggcgtgtcagaccctgcagggcataacaagtctgttcgccaaggtaacccgaggaccatctcctttctattttgtggtcaatctcagacctgcatagcttatttgcttgaccgagagcatgcttattttactgtaagatatcccgatactgttatcacaaaatgatactccctctgacccaaattagttgacttggatttgtctagattcgattgtatctagacatgatttagtattagatacaaatttgagtcaataatttgggtcggagggagtagataggatacagattactgcagcaatcttgatagattcttatgcccaagtcgacatgctgagctgcctgatgtctccgcattgagatccacgaagaaattgggaaaatcaagatttgatcagatagctagcaccatcaacttggacataataaaatctctgtcaacttaggtgtggatgaactctattttttatattcagtatgatgttttctgaagggaaagtggacacagaaatacatgtacgctgcaatttaagtacgtatgactgaatgttttgattatataataggtctggaaaagtaggatgtctagaaagattttctgatgaatttagttgcacaaataacaatgacatccataagttggcaagccactgcttctccttagctattgtgtaggcttgctcagtttccaatgcatatatggatgtaggtctcgctggcatcatcgatctcccaaaggagggcgcatcagctccagaagtcgacatttcacagtaagtacctcagcacacttacattatagcttagttctcttgatagaacagtgaaagatgtatagtgcatttgtaattcctagatttcacttgtattattatgggtacgctgaaatgttgaagttggaatttcgttattctcttagattacacttctatacatcatagttatacactgtgcacctgctgtgagttccggaaattgaacctttgtcatgtggctgcaatctgtaaggttttatttttgatatagtatagttataaatcatgtgtaatctctcccgtctataacattattatgtaagatataagccatagtaatgctatatggtgtgatttctctatacaagttatgaaacttgtggtcaactttggaaagggagatatcccccaacacatgtttacctgttcttagtggttacagcccaggcacatggctgttgccttgcatggagtattattggacacttcaaaacatttcatgggaaagacttcttcatataagtattgtttaaaatttaattgccaactgaaacccgtacccaaatgacaagatgaaaagcccactttcatactaggcaatactatgtcatatgtgttatgggaccacagtaatgacgttgttctttcttttatagtgggtctgaagaccacatgggctcctaccaaatgaacgggatactgaatgaatcacataacgggaggcatgcctctctgtccaaggttgttgaattttgtatggcattgggtgggaaaacaccaattcacagtgtattagttgccaacaatggaatggcagccgctaagttcatgcggagtgtccggacatgggctaatgatacatttgggtcagagaaggcaattcaattgatagctatggcaactccggaagacatgagaataaacgcagagcacattagaattgctgatcaatttgttgaagtacctggtggaacaaacaataacaactatgcaaatgtccaactcatagttgaggtcagtactggtcatcccttgatgtgcaatttatgtatgagttcctttttgttcttttagcatgacatggcaacttcacttctgcagatagcagagagaacaggtgtttctgccgtttggcctggttggggccatgcatctgagaatcctgaacttccagatgcactaactgcaaaagggattgtttttcttgggccaccagcatcatcaatgaacgcactaggtgacaaggttggttcagctctcattgctcaagcagcaggggttcctactcttgcttggagtggatcacatgtaagcctcacattctcacttataacttgtcgcctgatatttgtagtgaatgcattttataacatactggcactttattataggtggaaattccattagaactttgtttggactcgatacctgaggagatgtatagaaaagcttgtgttactaccgcggatgaagcagttgcaagttgtcagatgattggttatcctgccatgatcaaggcatcctggggtggtggtggtaaagggattagaaaggtacattattcatttgattggactgtactcgagagattgtgtgggctgtgatattctgtgcgcattgtttagccctaaccctttttaacatattaactagatatctcttgcaggttaataatgacgatgaggttaaagcactgtttaagcaagtacagggtgaagttcctggctccccaatatttatcatgagacttgcatctcaggttagacttctctggaatttcagttttcaaagcatgctgtttctgaattgtatattgtacgtctggaagcttcatttgcctcttccttgcaggctagaattgtattctgtaatctgtactcaatggtaattttcatttagtccctctcccctttccttttgtagagtcggcatcttgaagtccagctgctttgtgatcaatatggcaatgtagcagcacttcacagtcgtgattgcagtgtgcaacgacgacaccaaaaggtatgctgctccagattgaaaccattgctttcatttggggtctgcttacacctgaagatttgatcaaatggttcaactgggtccattttgttttgtttataacagataattgaagaaggaccagttactgttgctcctcgtgagacggtgaaagagctagagcaagcagcaaggaggcttgctaaggctgtgggctatgttggtgctgctactgttgaatatctctacagcatggagactggtgaatactattttctggagcttaatccacggttgcaggtttgttcttttgaacactcttcaggacttatattttgttggcagtcgtttatattgttaaatgttctacattcaggttgagcacccagtcactgagtggatagctgaagtaaatttgcctgcagctcaagttgcagttggaatgggtatacccctttggcaggttccaggtaataataatatcatcataaattttcagtttctgtctcatgctatttctgtgtctaactatcttcttgtacagagatccgacgtttctacggaatggacaatggaggtggctatgacatttggaggaaaacagcagctcttgctactccattcaactttgatgaagtagattctcaatggccgaagggtcattgtgtagcagttaggataactagtgagaatccagatgatggattcaagcctactggtggaaaagtaaaggtgggatttcttaatgtgatatctatgtttcaagcacactagggttagtaaactgacatgatcttgattttttcgtgtatttcaggagataagttttaaaagtaagccaaatgtctggggatatttctcagttaaggtaagctgttcatagctctgttgcagtgtcatgttccgagtttccgaagaacattggtctgccaagactttttatttcgaatcagtattctcagttgggttttgactaagtattgatccaatgaactaatgttttctcccccttcatatgttttcagtctggtggaggcattcatgaatttgcggattctcagtttggtatgtaaagtttgacccagtgaatattcttgtttgctttttgtatttccttacagtgaaattgctcctttcattgcaggacatgtttttgcctatggggtgactagatcagcagcaataaccaacatgtctcttgcattaaaagagattcaaattcgcggagaaattcatacaaacgttgattacactgttgatctcttgaatgtaagtaatagtaacatgttgaatcccacttttgatgtaatacaaccattttacgtccggctttccttcaaagtaatcccatgctgtgtttcctgtatctttaattcaggccccagacttcagagagaacacgattcatactggctggctggataccagaatagctatgcgtgttcaagctgagaggcctccctggtatatttcagtggttggaggagctctatatgtaagataaagaaactatgttaatgttactgcaacttttgataagccagttgtggaaaacacagctagtgtttaattgaaatcattgttttgtgctgtagaaaacaataaccaccaacgcagacaccgtttctgaatatgttagctatctcatcaagggtcagattccaccaaaggtagtttcttactgggcttaaactctgtatattgcttgaaggtgaacattgttgaccattgtttttgtgcagcatatatcccttgttcattcgactatttctttgaatatagaggaaagcaaatatacagtaagtgtgacattccttaaagaaagactctcagttataatgaaatgatagctattgctgatgctcatgtacaccatgccacagattgagattgtgaggagtggacagggtagctacagattgagaatgaatggatcacttattgaagcaaatgtacaaacattatgtgatggtggccttttaatgcaggtaccttctttcttttatacttgcacataaatataatttaattttgtaaagtactgctgaaagagttctgattccttagttctgatgtctccagctggatggaaacagccatgttatttatgctgaagaagaagcgggtggtacacggcttcttattgacggaaagacatgcttgttacaggtaagaatattttgtttatttgttcctttatttataataatgttagtgtttgatgataggacttcgtattcttatttgtgatactgcattcaccttttgaccattagcacatcattttgaaaagaaaagataaattggtattgtgaactaatggatggtacaacatgatgtttttcgagatctattctgtgtcgaaatgtaaaggtgatatttaattttaccgagagcaggtcttgtgatgtataaggacaagttacatagctgcaatgttctgttatatacttatattgcttcttctgtttctcaaatctagttattacaacgacactgtattttttataatcactaataaggcgcaaaaaaagttagaaggtgtccttctcctacaaaactatgtcacgcctgatcaaatcactttgtgatacaaaagaacagttgaatactttatgtttttcttgcaccaatactttatgattcttgatcatgctgcattgtatcctcaactaaataaatgacaaattgttttgcagaatgatcatgatccgtcaaggttattagctgagacaccctgcaaacttcttcgcttcttgattgccgatggtgctcatgttgatgctgatgtaccatatgcggaagttgaggttatgaagatgtgcatgcccctcttgtcgcctgctgctggtgtcattaatgttttgttgtctgagggccaggcgatgcaggttatattgctgcactttcatatcttctgctgttaataaccattgcatgtgaagcatctgaacttaatattcatttcaggctggtgatcttatagcgagacttgatctcgatgacccttcagctgtgaagagagctgaaccattcgaaggatcttttccagaactgagccttcctattgctgcttctggccaagttcacaaaagatgtgctgcaagtttgaatgctgctcgaatggtccttgcaggatatgatcatgcggtcaacaaagtaaacatcatgacccctacagtaactatatttctattattttgtctcatgtttccttttttctcaaataccatttattattattacgaattctggagtattcttagttccttattggcattttctgccttttgctaccaaatggtttctaatatagagaagttcttggtgtttgtcttcgcaaatcttgattttaatgcttttctcttatgttcatcatacctgctgatgatataggctgtatttatccttttgctatttttttctcccagtaaatcatgatagagatgctcttcctcaaatgttcatcatgctcagtatttattatatactccctccgtttcaaaatataagatgttttagctttgtgaaaggagtgtatctagaccagttttagtatgtaggttcactccaaacctacatgaacctacacactaaaaggggtctagatacactcctttcacaaagctaaaacatcttatattttgaaacgaagggagtagattgtatttttccttgtgctatgtttctttctttcagtaactgatgtttacagatcaaactttgtactttgttgtaatttatagtctaagcttagcatttgattaccttttccattgtactgggcttctttttcaggttgtacaagatttggtatggtgcctagatacacctgagctccctttcctacaatgggaagagcttatgtctgttttagcaactagacttccaagacgtcttaaaagtgaggtatgtgataattgatatgatacgcagaatctggcataaagagacgttgatacatttaatttatgatatactcccttcgttccaaattataagatgttttagatatttcattatggtctacatgcggaccgaaatgagtgaacctacacactaaaaggtgtctagatacagcgtttcagcaaaaatctaaaacatcttataatttgaaatggatgtagcatgtcacttatcagatttacattctacattgttcaatcaccttagttatttgcctcaacttattgtgcaacttttagatttattctaataatgtaatgaaaattcagaatctttcacttcaattcttcgtaacatgaaacatttggtactctgtctcatttatttgcactgtatgttgttttagttggcttgccattctaactgaatctttaaagaagttcttatttgtttttaacccagttcttgtttattgatcttttataccttgtgttctgcctcaaccgttcctaatttttatgcatccagctggagggtaaatacagtgaatataagtcaaatgttgaccatgtgaagatcaaggatttccccaccgagatgcttagagagacaattgaggtcagtttttggtttcttatggcatcccagtctaagtcgtactactttttgtaacaagttttcttttaggaaaatcttgcgtatgtttctgagaaggaaatggcaacaattgagaggcttgttgaccctctgatgagtctactgaagtcatatgagggtgggagagaaagccatgcccactttattgtcaagtccctgttcgaggagtatctctcggttgaggaactattcagtgatggcattcaggttatcttacatttcaaaactgagcagatcaactagattcattttaagggtcattcttttcccttcttttagttatgaccatgtatgaattgatgccacacacaaattatagattgcatcagaacctctttggtaattaagtagcaaataatttgtacatggcttaagacttatttcctccagaacatttttcactcattgttttcctcaaaatgtgccattttgtagtctgacgtgattgaacgcctgcgcctacaatatagtaaagacctccagaaggttgtagacattgttttgtctcaccaggtaaattactttttggcctaatgacttggtgcaagtgatcactgaagcaatattagttactgatggtttgattttgttctagggtgtgagaagcaaaactaagctgatactcacgctcatggagaaactggtctatccaaaccctgctgcctacagggatcagttgattcgcttttcttccctcaaccataaaagatattacaaggtggcagtggtgacctaaaataatggaagctttttgaataattctgttgtgatatcttaggccaacgaattaatttcattgttataatgcagctggcccttaaagctagtgaacttctcgaacaaaccaagctcagtgaactccgcacaagcattgcaaggaacctttcagcactggagatgtttactgaagaaagggcaggtttctccttgcaagagaagaaatttgccattaatgagagcatgggagatttagtcagtgccccactgccagttgaagatgcacttatttctttgtttgattgtattgatcagactcttcagcagagagtgatcgagacgtacatatctcgattataccaggtatgttttggattttatcatactcagcatttctggaagcatacactaaagttcctaatgaaataagatgctcagtgtttctttacaataaattataaataatctaggcgtgtgaagatttgatttagaacttcttgtagacatgctgctgctctgtaagttgtctaacttgccaatgctattttcagcctcaacttgtgaaggatagtatccagctgaaatatcaggattctgctgttatcgctttatgggaattcaatgaagggcatcctgagaatagattgggtgctatggttatcctgaagtctctagaatctgtgtcaacagccattggagctgctctaaaggatagatcacattatgcaagctctgcgggtaacacagtgcatattgctttgttggatgctgatactcagacgtatacagctgaagataggtatgttcatgtgcagtattagtgccaatgagcttatttggtgcatttcttaaaataagttaacctatttctttcagtggtgataatgaccaagctcaagacaggatggacaaactttctgtaatactcaaacaagatattgtcacgtctgatctacgtgctgctggtgtcaaggttattagttgcattgttcaaagggatggagcactcatgcctatgcgccgtaccttcctcttgtctgaggaaaatctttgttatgaggaagagccgattcttcggcatgtggagcctccactttctgcccttcttgagttggtatgtaactcgatcaaactgactgcatgctgtcctgatgcacttcaatgctttcattttattacttgctacttgtatttatgtagccttctgtggatacaggataaattgaaagtgaaaggatacaatgagatgaagtatacaccgtcacgtgatcgtcagtggcatatatacacacttagaaatactgaaaaccccaaaatgttgcacagggtatttttccgaactcttgtcagacaacccagtgctggcagcaagtttatgtcaggccatgtcaatgatgttgaagtaggacatgctgaggaatctctttcatttacatcaagcagcatattaagatcgttgatgactgctatagaagaattggagcttcacgcgattaggactggtcattctcatatgtacctgtgcatactgaaagagcaaaagcttcttgaccttgttcctgtatcagggtaagtgggcacatcgttctttttgtcgaacatatattccttgctcttgtgtttcgccttctcaacgagcttttcatcttactcaggaacacagttgtggatgttggccaagatgaagctactgcgtgctctcttatgaaagaaatggctctaaagatacatgaacttgttggcgtaagaatgcatcatctttctgtatgccagtgggaagtgaaacttaagttggacagcgatggacctgccagtggtagctggagagttgtaacaaccaatgtcactagtcgcacctgcactgtggatgtaagttttatccccttgcatcttgtttctctgtgtggaactagtgaaactaaagtgaacaacatatgccacatatacatagaactatcatcttatttagtttgttgtcatttccacctcatttagacatttaggtctgaagctcatggtgcttttcctgtttttagatctaccgggaggtcgaaggtacagaatcacagaaactagtataccactctgccccatcatcttctggtcctttgcatggtgtcgcactgagtaattcatatcagcctttgagcgttattgatctaaaacgatgctctgccaggaacaacagaacaacatactgctacgattttccattggttagtatctctctttctgtattgtgtcttctgttagcagattcgtattggtcttacatgtcctcctaaagctgataagaactcaaaaatgtaggcatttgaaactgcagtgcggaactcgtgggctaacatttctagtgagaacaaccaatgttatgttaaagcgacagagctggtgtttgctgacaagaatgggtcgtggggcactcctataattcctatgcagcgtgctgctgggctcaatgacataggtatggtagcgtggatcttggacatgtccactcctgaatttcccagtggcagacagattattgttatcgcaaatgatattacttttagagctggatcatttggcccaagggaagatgcattttttgaagctgttaccaacctggcttgtgagaaaaagcttcctcttatctacatggcagcaaactctggtgctcggattggcattgctgatgaagtaaaatcttgcttccgtgttgaatgggttgatcctgccaaccctgaacgtggatttaagtacatttatctgaatgaagaagactatggccgtattagctcttctgttatagcgcacaagacacagctagatagtggtgaaattaggtgggttattgattctgttgtgggcaaggaggatggactaggtgtggagaacatccatggaagtgctgctattgccagtgcttattctagggcatatgaggagacatttacacttacatttgtgagtggacgaacggttggaataggagcttatcttgctcgacttggcatacgttgcatacagcgtattgaccagcccattatcttaactgggttttctgccctgaacaagcttcttgggcgggaagtgtacagttcccacatgcagttgggtggtcccaaaatcatggctacaaatggtgttgtccatctgactgttccagatgaccttgaaggtgtttctaatatattgaggtggctcagctatgttcctgccaacattggtggacctcttcctattacaaaatctttggacccaatagacagacctgttgcatacatccctgagaatacatgtgatcctcgtgcagccatcagtggcattgatgacagccaagggaaatggttgggtggtatgtttgacaaagacagttttgtggagacatttgaaggatgggcaaagacagtagttaccggcagagcgaaacttggagggattcctgtgggtgttatagctgtggagacacagaccatgatgcagctcgtccctgcagatccaggccagcctgattcccatgagcggtctgttcctcgtgcggggcaagtctggtttccagattcagctaccaagacagcgcaggcaatgttggacttcaaccgtgaaggattacctctgttcatccttgctaactggagaggtttctctggtgggcaaagagacctttttgaaggaattctgcaggctggatcaacaattgttgagaaccttaggacatacaatcagcccgcctttgtatatatccccaaggctgcagagctgcgtggaggggcttgggtcgtgattgatagcaagataaatccagatcgcattgagtgctatgctgagacgactgcaaaaggcaatgttctcgagcctcaagggttgattgagatcaagttcaggtcagaggaactccaagattgcatggataggcttgatccagaattggtaaatttgaaagcaaaactccagggagcaaagcatgaaaatggaagtctatctgatggagaatccattcagaagagcatagatgctcgaaagaaacagttgctgcctttgtacactcaaatcgcgataaggtttgcggaattgcatgacacttccctcagaatgcttgccaaaggcgtgattaggaaagttgtagactgggaagaatctcggtctttcttctacaagagattacggaggagggtatcggaggacgttcttgcaaaggagattagaggtgtaattggtgagaagttttctcacaaatcggcagtcgagttgatcaagaaatggtacatggcttctgaggcagctggagcaggaagcactgactgggatgatgatgatgcttttgtcgcctggagggagaaccctgaaaactatgaggagcatatcaaagagctaagggctcaaagggtatctcagttgctctcagatgttgcaggctccagttcagatttacaagccttgccgcagggtctttccatgctactagagaaggtacgcatacttacagttttacctgcatctattttatttgcaagtttttaattgagggtgagtacaatgttgctatctaaatatacacttagtatgtaaccaaacagtgctgctatctttttcatctattgtatcataccaaataatgtctgagccgcttctctttggacacttgttcagatggatccctctaggagagcagagtttattgaggaagtcaagaaggtccttaaatgatcaaatgataccaacacatccaatacagaatgtgcatgatatctgttttctcttgaagtacatatatagaaggataatagctaatatgggccaaccattgtttttgtaaacttgttggtggtctatgtcattcaaggcacaacttgcttttggacgcaagcctggttgaggagtgtaagtggatgtgttcgttctggtgcctcaggacttgagaagaataggggctggtgaactagagttcttgttctgtggtggtactgtttctctggtgctgtagttctgtgatgtactgtttcctgttcgatgctgtaattctagtcttggaatgtgatcgagtccattcaattttgaacatgaataatatgttttgtaggcctcatgtgtaccggtacgtggaataaatgttcgttgagttagcattgaacatggaaatctgttggattgtaatgcatgatagagttgtaattgtgcaagttacaactgtcattttcctatacttgatttctagtccatttttgtc

SEQ ID NO: 972 - protein, 2323 aa, Avena sativa
MGSTHLPIVGFNASTTPSLSTLRQVNSAGAAFQSSAPSRTSKKKSRRVKSIRDDGDGGVSDPAGHNKSVRQGLAGIIDLPKEGASAPEVDISHGSEDHMGSYQMNGILNESHNGRHASLSKVVEFCMALGGKTPIHSVLVANNGMAAAKFMRSVRTWANDTFGSEKAIQLIAMATPEDMRINAEHIRIADQFVEVPGGTNNNNYANVQLIVEIAERTGVSAVWPGWGHASENPELPDALTAKGIVFLGPPASSMNALGDKVGSALIAQAAGVPTLAWSGSHVEIPLELCLDSIPEEMYRKACVTTADEAVASCQMIGYPAMIKASWGGGGKGIRKVNNDDEVKALFKQVQGEVPGSPIFIMRLASQSRHLEVQLLCDQYGNVAALHSRDCSVQRRHQKIIEEGPVTVAPRETVKELEQAARRLAKAVGYVGAATVEYLYSMETGEYYFLELNPRLQVEHPVTEWIAEVNLPAAQVAVGMGIPLWQVPEIRRFYGMDNGGGYDIWRKTAALATPFNFDEVDSQWPKGHCVAVRITSENPDDGFKPTGGKVKEISFKSKPNVWGYFSVKSGGGIHEFADSQFGHVFAYGVTRSAAITNMSLALKEIQIRGEIHTNVDYTVDLLNAPDFRENTIHTGWLDTRIAMRVQAERPPWYISVVGGALYKTITTNADTVSEYVSYLIKGQIPPKHISLVHSTISLNIEESKYTIEIVRSGQGSYRLRMNGSLIEANVQTLCDGGLLMQLDGNSHVIYAEEEAGGTRLLIDGKTCLLQNDHDPSRLLAETPCKLLRFLIADGAHVDADVPYAEVEVMKMCMPLLSPAAGVINVLLSEGQAMQAGDLIARLDLDDPSAVKRAEPFEGSFPELSLPIAASGQVHKRCAASLNAARMVLAGYDHAVNKVVQDLVWCLDTPELPFLQWEELMSVLATRLPRRLKSELEGKYSEYKSNVDHVKIKDFPTEMLRETIEENLAYVSEKEMATIERLVDPLMSLLKSYEGGRESHAHFIVKSLFEEYLSVEELFSDGIQSDVIERLRLQYSKDLQKVVDIVLSHQGVRSKTKLILTLMEKLVYPNPAAYRDQLIRFSSLNHKRYYKLALKASELLEQTKLSELRTSIARNLSALEMFTEERAGFSLQEKKFAINESMGDLVSAPLPVEDALISLFDCIDQTLQQRVIETYISRLYQPQLVKDSIQLKYQDSAVIALWEFNEGHPENRLGAMVILKSLESVSTAIGAALKDRSHYASSAGNTVHIALLDADTQTYTAEDSGDNDQAQDRMDKLSVILKQDIVTSDLRAAGVKVISCIVQRDGALMPMRRTFLLSEENLCYEEEPILRHVEPPLSALLELDKLKVKGYNEMKYTPSRDRQWHIYTLRNTENPKMLHRVFFRTLVRQPSAGSKFMSGHVNDVEVGHAEESLSFTSSSILRSLMTAIEELELHAIRTGHSHMYLCILKEQKLLDLVPVSGNTVVDVGQDEATACSLMKEMALKIHELVGVRMHHLSVCQWEVKLKLDSDGPASGSWRVVTTNVTSRTCTVDIYREVEGTESQKLVYHSAPSSSGPLHGVALSNSYQPLSVIDLKRCSARNNRTTYCYDFPLAFETAVRNSWANISSENNQCYVKATELVFADKNGSWGTPIIPMQRAAGLNDIGMVAWILDMSTPEFPSGRQIIVIANDITFRAGSFGPREDAFFEAVTNLACEKKLPLIYMAANSGARIGIADEVKSCFRVEWVDPANPERGFKYIYLNEEDYGRISSSVIAHKTQLDSGEIRWVIDSVVGKEDGLGVENIHGSAAIASAYSRAYEETFTLTFVSGRTVGIGAYLARLGIRCIQRIDQPIILTGFSALNKLLGREVYSSHMQLGGPKIMATNGVVHLTVPDDLEGVSNILRWLSYVPANIGGPLPITKSLDPIDRPVAYIPENTCDPRAAISGIDDSQGKWLGGMFDKDSFVETFEGWAKTVVTGRAKLGGIPVGVIAVETQTMMQLVPADPGQPDSHERSVPRAGQVWFPDSATKTAQAMLDFNREGLPLFILANWRGFSGGQRDLFEGILQAGSTIVENLRTYNQPAFVYIPKAAELRGGAWVVIDSKINPDRIECYAETTAKGNVLEPQGLIEIKFRSEELQDCMDRLDPELVNLKAKLQGAKHENGSLSDGESIQKSIDARKKQLLPLYTQIAIRFAELHDTSLRMLAKGVIRKVVDWEESRSFFYKRLRRRVSEDVLAKEIRGVIGEKFSHKSAVELIKKWYMASEAAGAGSTDWDDDDAFVAWRENPENYEEHIKELRAQRVSQLLSDVAGSSSDLQALPQGLSMLLEKMDPSRRAEFIEEVKKVLK

SEQ ID NO: 973 - DNA, 14034 bp, Avena sativa
  source 1..14034: mol_type = genomic DNA
accccctctcggtctcgggatatccgcccgcccgcgctcgctcgctccactctccccgcccccctccggcaccacgccgccgcaagatccaaagcccagccgcggcaggacgtcactctcgaagcacccgcgcgcgtcggcacgtccgcctccccgaggtgcgcgccctactccgctatttatttatgccctcccctcccccgccattccactgtcgcgccccagatccgccgtccgatctgcctccgctcccggaggtgaggacagccgccaccgctcctctcatatgttattgctgtgttttgtgcgcgccgggccggggccgttcgtccgcggctttcgttcgtgggggtggcggggaggggtttaagggtactgtgctgcgcgggacctggggttagtgcgctctgtgtttgaaactcggccgagcttgggattggattgttgggagctcgcggtggcatgcttaggtagtggcgatagtcaggagaatgctgaaatgcggctcgcctactgtatcaatgcgaggtactagtgatcattggccggtcgaaggtgccctgtgcctagcattgtctttctcaggctggttcctctgtgcttccgtggaacatatccatgctaagcgcaagctgcctgcgatggtacaccatggcagtgcagtagacgaggagtgcgctggtgctgccaatgataggtttatgttcttagtttcctgttaggagggtattaatgctacccattgtagtatgacactgagctacctaccttggtttttggtaataaagtttgggtttcctgtttcattggagaattgcattccttgcctattttagtccagagcatcttggttgtttgaacttaccgagagaggccgtgaattaatccatgaagtttcctgttgcgtgtctctatggactaatgatttctgtgcgcatgcatctgtcaggtttccatacctggggtttacacactcggtttatggcactgtgcatctgaagaacactgcaactgtgctgtctgtccagagggagaacaatgggatccacacatttgcccattgttggatttaatgcctccacaacaccatcgctatccactcttcgccaggtaaattcagctggtgctgcattccaatcttctgccccttcaaggacctccaagaagaaaagtcgccgtgttaagtcaataagggatgatggtgatggaggcgtgtcagaccctgcagggcataataagtctattcgccaaggtaacccgaggaccatctcctttctattttgtggtcaatctcagacctgcatagcaaatttgcttgaccaagagcatgcttattttagtgtaagatatcccaatagtgttatcacaaaatgatagataggatatagatcactacagcaatcttcatagattcttatgcccaagttgacatgctgagctgtctgatgtctccgcattgagattcatgaatgaattgggaaaatcaagattagatcagatagctagcacaatcgacttagacataataaaatctctgtcaacttaggtgtagatggactctattttaatattcaatatgatgttttctcaagggaaagtggacacgaaaatacatgtatgctgcaatttaagtacgcatgactgaatgttttgattatataataggtctggaaaagtctagaaagatttcctgatgaatttagttgcacaaataacaataacatccaaaagttgccaaaccactgcttcttcttaggtattgtgtaggcttgctcagtttccaatgcatatctggatgtaggtctcgctggcatcatcgacctcccaaaggagggtgcatcagctccagaagtggacatttcacagtaagtacttcagcacactttatagtttagttctgatagaacagtggaagatgtataacgcatttgtaattcctggatttcacttgtcttattatgggtacacttaaatgttgaagttggaattttgttatctcttagattacacttctatacatcatagttatacactatgcacctgctgtgagttctggaaattgaacctttgtcatgtggcgcactttaatctgtaaggttttatttttgatatagtatagttataaatcatgtgcaatctctcccgtctataccattatttatgtaagatataatccatatttggtgtgatttctctttacaagttgtgaaacttgtgttcaactttgtaaagggaaatatcccccaacatatatttacctgttctagtggttacagcccaggcacatggctgttgccttgcatggagttttattgggcacttaaaaacatttcatgggaaacactttttcatataagtattgtttaaatttaattgccatctgaaacccgtacccgaatgacaagatgaaaaagcccacctgtgtttctgattcatactaggcaatactatgtcatgtgttatgggaccacagtaatgatgttgctctttcttttatagtgggccggaagaccacatgggctcctaccaaatgaatgggatactgaatgaatcacataacgggaggcacgcctctctgtccaaggttgttgaattttgtatggcattgggtggaaaaacaccaattcacagtgtattagtcgccaacaatggaatggcagcggctaagttcatgcggagtgtccggacatgggccaatgatacatttgggtcagagaaggcgattcagttgatagctatggcaactccggaagacatgagaataaacgcagagcacattagaattgctgatcaatttgttgaagtacctggcggaacaaacaacaacaactatgcaaatgtccaactcatagttgaggtcagtactgatcatcccttgatgtgcaatttatgtatgagttcctctttgttcttttagcatgacatggcaacttcacttttgcagatagcagagagaacaggtgtttctgccgtttggcctggttggggccatgcatctgagaatcctgaacttccagatgcactaactgcaaaaggaattgtttttcttgggccaccagcatcatcaatgaacgcactaggtgacaaggttggttcagctctcattgctcaagcagcaggggttcctactcttgcttggagtggatcacatgtaagcctcacattctctgtgataactcgtcgcctgatatttgtagtggatgcattttataacataatggcactttattataggtggaaattccattagaactttgtttggactcgatacctgaggagatgtataggaaagcttgtgttactaccgcagatgaagcagttgcaagttgtcagatgattggttatcctgccatgatcaaggcatcctggggtggtggtggtaaagggattagaaaggtacattattcatttgattggagtgtacttgagttctgtgcgcagtgttagccctaaccctttttaacatattattaactagatatctcttgcaggttaataatgatgatgaggttaaagcactgtttaagcaagtacagggtgaagttcctggctccccaatatttatcatgagacttgcatctcaggttagacttctggaatttctgttttctaagcatgctgtttctgaattgtatattgtatgtctggaagcttcatttgcgtcttccttgcaggctagaattgtattgtgtaatctgtactcaatggtaattttcattttaatccctctcctctttccttttgtagagtcgacatcttgaagtccagctgctttgtgatcaatatggcaatgtagcagcacttcacagtcgtgattgcagtgtgcaacgacgacaccaaaaggtatgctgctccagattgaaatcattgctttcatttgtggtctgcttacctgaagttttgatcaaatggttcaactgggtccattttgttttgtttataacagataattgaggaaggaccagttactgttgctcctcgtgagacggtgaaagagctagagcaagcagcaaggaggcttgctaaggctgtgggttatgttggtgctgctactgttgaatatctctacagcatggagactggcgaatactattttctggagcttaatccacggttgcaggtttgttcctttgaacactcttcaggacttatattttgttggcagtcgtttatattgttaaatgttctacattcaggttgagcaccccgtcactgagtggatagctgaagtcaatttgcctgcagctcaagttgcagttggaatgggtatacccctttggcaggttccaggtaataataatatcatcgtaaatttacagtttctgtcccatgatatttctgtgtctaactatcttcttatacagagatccgacgtttctacggaatggacaatggaggtggctatgacatttggaggaaaacagcagctcttgctactccattcaactttgatgaagtagattctcaatggccaaaggggcattgtgtagcagttcggataactagtgaaaatccagatgatggattcaagcctactggtggaaaagtaaaggtgagatttcttaatgtgatatctatgtttcaagcacactagggttagtaaactaacctgatcttaattttttcgtgtatttcaggagataagttttaaaagtaagccaaatgtctggggatatttctcagttaaggtaagctgttcatagctctgttgcagtgtcatgttccgagtttccacagaaaattggtctgcaagactttttattcgaaccagtattctcagttgggttttgactaagtattgatccaatcaacaaatgttttctcccccttcatctgttttcagtctggtggaggcattcatgaatttgcggattctcagtttggtatgtaaaatttgacccagtgaatattcctctttgctttttgtatttccttacagtgaaattgctcctttcattgcaggacatgtttttgcctatggggtgactagatcagcagcaataaccaacatgtctcttgcattaaaagagattcaaattcgcggagaaattcatacaaacgttgattacacggttgatctcttgaatgtaagtaatagtaacttgttgaatcctacttttgatgtaatacaaccattttacatccggctttccttcaaaataatcccatgctgtgtttcctgtatcattaattcaggccccagacttcagagaaaacaccattcatactggctggctggataccagaatagctatgcgtgttcaagctgagaggcctccctggtatatttcagtggttggaggagctctatatgtaagataaagaaactatgttaatgttactgcaacttttggtaacccaattacggaaaacacaactatagtgtttaattgaaatcattgttttgtgctgtagaaaacaataaccaccaacgcggacaccgtttctgaatatgttagctatctcatcaagggtcagattccaccaaaggtagtttcttattgggcttaaactctgtatattgcttgaaggtgaacattgttgaccattgtttttgtgcagcacatatcccttgttcattcaactatttctttgaatatagaggaaagcaaatatacagtaagtgtgacattccttaaagaaagactctcagttataatgaaatgatagctattactgatgctcatgtacaccatgtcacagattgagattgtgaggagtggacagggtagctacagattgagaatgaatggttcacttattgaagcaaatgtacaaacattatgtgacggtggccttttaatgcaggtaccttctttcttttatacttgcacataaatataattcaagtttgtaaagtacttctgaaagagttctgattccttagttctaatgtctccagctggatggaaacagccatgttatttatgctgaagaagaagcgggtggtacacggcttcttattgatggaaagacatgcttgttacaggtaagattttttttatttgttcctttatttataatgttagtgtctaatgacaggactttgtattcctattcgtgatactgcattcaccttttgaccattagcacttcattttgaaaagaaaagataagtcggtattatgaactaatggttggtacaacatgatgtttttcgagatctattctgtgtcaaaatgtaaaggtcactgcttaagcagccagacacaccaggtgatattaaactttaccgagagcaggtcttgtgatttataaagacaagttacataactgcaatgttctgttatattgcttctgattctcaaatctagttattccaacgacactgtatttttaataatcactaatttatcataataagatgcaaaataagttagaaggtgtcctactcctacaacactgtcacgtctgatcaaatcatctttgtgatataaaagaacagttgaatacttttatgtttttcttgcaccaatactttatgattcttgatcatgctgcattgtatcctcaactaaataaatgacaaatcgttttgcagaatgatcatgatccgtcaaggttattagctgagacaccctgcaaacttcttcgtttcttgattgccgatggtgctcatgttgatgctgatgtaccatatgcggaagttgaggttatgaagatgtgcatgcccctcttgtctcctgctgctggtgtcattaatgttttgttgtctgagggccaggcgatgcaggttatattgctgcactttcatttcttcggctattaataaccattgcatgttaagcatctgaacttaatattcttttcaggctggtgatcttatagcaagacttgatctcgatgacccttcagctgtgaagagagctgaaccattcgaaggatcttttccagaactgagccttcctattgctgcttctggccaagttcacaaaagatgtgctgcaagtttgaatgctgctcgaatggtccttgcaggatatgaccatgcagtcaacaaagtaaacatcaagacccctacagcaactatgtttctattattttgtctcatgtttcctttttttctcaaataccatttattattattacgaattctggattattcttagttcctcattggcattttctgccttttgctaccaaatggtttctaatgtcgagaagttcttggtgcttgtcttcgcaaatcttgattttaatgcttttctcttatgttcaccatactcactgatgatataggccgtatttatccttgtgatatttttctctccctgtaaatcatgatagagatgctctttctcttatgttcatcatgctcagtattttttattatatagatcgtatttttccttgtgctatttttctttctttcagtaactgatgtttacagatcaaactttgtaccttgttgtaatttatagtctaagatcagcatttgattaccttttccattgtactgggcttcttttttaggttgtacaagatttggtatggtgcctagatacacctgagcttcctttcctacaatgggaagagcttatgtctgttttagcaactagacttccaagacgtcttaagagtgaggtatgtgataattgatatgatatgcagaatctggcatgaagagatgttgatacatttaatttatgatatactccctccgttccaaattataagttgttttagctatttcattgtggtctactacatacggaccaaaatgagtgaacctacgcactaaaaggtgtctagagacatgcgtttcagaaaaaagctaaaacatcttataatttgaaacggagggactatatagaaggttcttagccctgaactaaaagatcatgtcacttaataagatttacattgttcaatcaccttggttattttcctcaacttattatgcaacttttagctttattctaataatgtaatcaaaattcagaatatttcacttcaattcttcgtagcatgaaacatctggtactctgtctcatttatttgcactgtacgttgtttattgatcttctgcctcaaccgtttctaatttttatgcatccagttggagggtaaatacagtgaatataagttaaatgttgaccatgtgaagatcaaggatttccccaccgacatgcttagaaagacaattgaggtcagtttttggtttcttatggtaccccagtataagtcgtactactttttgtaacaagttttcttttaggaaaatcttgcatatgtttctgagaaggaaatggcgacaattgagaggcttgttgaccctctgatgagtctactgaagtcatatgagggtgggagagaaagccatgcccactttattgtcaagtcccttttcgaggagtatctctcggttgaggaactattcagtgatggcattcaggttatcttacatttcaaaactgagcagatctactagttcattttaagggtcattctttttccttcttttagttatgaacatgtacgaattgatgccacacacatgttatagattgcatcagaacctgttgggtaattaagtagcaaataaattgtacatggcttaagaattatttccttcaaaacacttttcactcaccgttttcctcaaaatatgccattttgtagtccgacgtgattgaacgcctgcgcctacaatatagtaaagacctccagaaggttgtagacattgttttgtctcaccaggtaaattactttttggcctaatgacttggcgcaagtgatcactgacgcaatcttcattactgattgtttgattttgttctagggtgtgagaagcaaaaccaagctgatactcacgctcatggagaaactggtctatccaaaccctgctgcctatagggatcagctgattcgcttttcttccctcaaccataaaagatattacaaggtagcagtggtgacctaaaataatggaagctttttgaataattctgttgtgatatcttaggctaatgaattaatttcattgtaataacgcagctggctcttaaagctagtgaacttctcgaacaaaccaagctcagtgaactccgcacaagcattgtaaggaacctttcagcgctggagatgtttactgaagaaagggcaggtttctcgttgcaagagaagaaattggccattaatgagagcatgggagatttagtcagtgccccactgccagttgaagatgcacttatttctttgtttgattgtattgatcaaactcttcagcagagagtgatcgagacgtacatatctcgattataccaggtatgttttggattttatcatactcaccatttctggaagcatacactaaagttcctaatgaaataagatgctcagagtttgtttaaaataaattataaataatctaggtgtgggaacatttgatttagaacttcttgtggacatgttactgctctgtatgttgactaacttgccaatgatattttcagcctcaacttgtgaaggatagtatccagctgaaatatcaggattctgctgttatcgctttatgggaattcaacgaagggcatcctgataatagattgggtgctatggttatcctgaagtctctagaatctgtgtcaacagcaattggagctgctctaaaggatagatcacattatgcaagctctgcgggtaacacagtgcatattgttttgttggatgctgatactcagacgaatacaactgaagataggtatgttcatgtgcagtattagtgccaatggcttatttggtgcaattcttaaaataagttaacctatttgactatttctttcagtggtgataacgaccaagctcaagacaggatggacaaactttctgtaatactgaaacaagatattgtcacggctgatctacgtgctgctggtatcaaggttattagttgcattgttcaaagagatggagcactcatgcctatgcgccgtaccttcctcttgtctgaagaaaagctttgttatgaggaagagccgattcttcggcatgtggagcctccactttctgcacttcttgagttggtatgtaactcgatcaaactgactgcacgctgtcttgatgcactttaatgctttcattttattatttgctagttgtatttatttagcctgctgtggatacaggataaattgaaagtgaaaggatacaatgagatgaagtatacaccgtcacgtgatcgtcagtggcatatatacacacttagaaatactgaaaaccccaaaatgttgcacagggtatttttccgaactcttgtcagacagccgagtgctggcaacaggtttatgtcaggccatatcaatgatgttgaagtaggacatgctgaggaatctctttcatttacatcaagcagcatattaagatctttgatgactgctatagaagaattggagcttcacgcgattaggactggtcattctcatatgtacttgtgcatattgaaagagcaaaagcttcttgaccttgttcctgtttcagggtaagcctgcacatcgttctttttgtcgaacatatatgccttgctcttgtgtttcgccgtctcaacgagcttttcatcttactcaggaacacagttgtggatgttggccaagatgaagctactgcgtgctctcttatgaaagaaatggctctaaagatacatgaacttgttggtgcaagaatgcatcatctttctgtatgccagtgggaagtgaaacttaagttggacagcgatggacctgccagtggtagctggagagttgtaacaaccaatgtcactagtcacacctgcactgtggatgtaagttttatccctttgcatcttgtttttctgtatgaaactagtgaaactaaagtgaacatatgacaaatatacatggagctatcatcttatttagtttgttgtcatttccacctcatttagacatttacgtctgaagctcatggtgcttttactatttttagatctaccgggaggtcgaagatacagattcacagaagctagtataccactatgctgcatcgtcacctggtcctttgcatggtgtcacattgagtaattcataccagcctttgagcgttattgatctaaaacgatgctctgccaggaacaacagaactacatactgctacgattttccattggttagtatctatctctctgtattatgtcttctgttagcacattcctattggtcttgcatgtcctcctaaagctgataagaactcaaaaatgtaggcatttgaaactgcagtgcggaagtcatgggctaacgtttctagtgaaaacaaccaatgttatgttaaagcaacagagctggtgtttgctgacaagaatgggtcgtggggcactcctatagttcctatgcagcgtgctgctgggctcaatgacatcggtatggttgcgtggatcttggacatgtccactcctgaatttcccagtggcagacagattattgttatcgcaaatgatattacttttagagctggatcatttggcccaagggaagatgcattttttgaagctgttaccaacctggcttgtgagagaaaacttcctcttatctacatggcagcaaactctggtgctcggattggcattgctgatgaagtaaaatcttgcttccgtgttgaatgggttgatcctgccaaccctgaacgtggatttaagtacatttatctgaatgaagaagactatggtcgtattagctcttctgttatagcgcacaagacacagctagatagtggcgaaataaggtgggttatcgattctgttgtgggcaaggaggatggactaggtgtggagaacatacatggaagtgctgctattgccagtgcttattctagggcatacgaggagacatttacacttacatttgtgagtggtcgaacggttggaataggagcctatcttgctcggcttggcatacggtgcatacagcgtattgaccagcccattatcttaactgggttttctgccctgaacaagcttcttgggcgggaagtgtacagctcccacatgcagttgggtggtcccaaaatcatggctacaaatggtgttgtccatctgactgttccagatgaccttggaggtgtttctaatatattgaggtggctcagttatgttcctgctaacattggtggacctcttcctattacaaaatctttagacccaatagacagacctgttgcatacatccctgagaatacatgtgatcctcgtgcagccatcagtggcattgatgacagccaagggaaatggttgggtggtatgtttgacaaagacagttttgtggagacatttgaaggatgggcaaagacagtagttactggcagagcaaaacttggagggattcctgtgggtgttatagctgtggagacacagaccatgatgcagctcgtccctgcagatccaggtcagcctgattcccatgagcggtctgttcctcgtgcggggcaagtctggtttccagattcagctaccaagacagcgcaggcaatgttggacttcaaccgtgaaggattacctctgttcatccttgctaactggagaggcttctctggtgggcaaagagacctttttgaaggaattctgcaggctggatcaacaattgttgagaaccttaggacatacaatcagcctgcctttgtatatatccccaaggctgcagagctgcgtggaggggcttgggtcgtgattgatagcaagataaatccagatcgcattgagtgctatgctgagacgactgcaaaaggcaatgttctcgagcctcaagggttgattgagatcaagttcaggtcagaggacctccaagattgcatggataggcttgatccagaattggtaaatctgaaagcaaaactccagggagcaaagcatgaaaatggaagtctatctgatggagaatcccttcagaagagcatagaagctcgaaagaaacagttgcttcctttgtacactcaaattgcggtaaggtttgcggaattgcatgacacttccctcagaatgcttgctaaaggcgtgattaggaaagttgtagactgggaagaatctcggtctttcttctataagagattacggaggaggatatctgaggacgttcttgcaaaggagattagaggtgtaattggtgagaagttttctcacaaatcagcagtcgagttgatcaagaaatggtacatggcttctgaggcagctgaagcaggaagcactgactgggatgatgacgatgcttttgtcgcctggagggagaaccctgaaaactatgaggagcatatcaaagagcttagggctcaaagggtatctcagttgctctcagatgttgcaggctccagttcggatttagaagccttgccgcagggtctttccatgctactagagaaggtacgcatacttacagtttcacgtgcatctgttttatttgcaagtttctaaaatgttgctatcttcatatatacacttagtatgtaacaaaacagcgctgctatctttttcatctatcgtatcataccaaataatgtctgagacacttctctttggacacttgttcagatggatccctctaggagagcagagtttattgaggaagtcaagaaggtccttaaatgatcaaatgatagcaacacatccaatacagagtgcatgatatctgtttctcttgaagtacatatatagaaggataatagctaatatgggccaaccattgtttttgtaaacttgttggtggtctatgtcattcaaggcacaacttgcttttggacccaagcctggttgaggagtgtaagtggatgtgttagttctggtgcctgagaagaataggggcaactgggtaacctaccgttggcgagagagctggtgatctagagttcttgttctgtggtggtactgtttccccggtgctgtagttctgtgatgtactatctcctgttcgatgctgtaattctagtcttggaatgtgattgagatgtccattcaattttgaacatgaataatatgttttgtaggcctcatgtgtaccggtatgtggaataaatggtcgttagcattgaacatgg

SEQ ID NO: 974 - protein, 2323 aa, Avena sativa
MGSTHLPIVGFNASTTPSLSTLRQVNSAGAAFQSSAPSRTSKKKSRRVKSIRDDGDGGVSDPAGHNKSIRQGLAGIIDLPKEGASAPEVDISHGPEDHMGSYQMNGILNESHNGRHASLSKVVEFCMALGGKTPIHSVLVANNGMAAAKFMRSVRTWANDTFGSEKAIQLIAMATPEDMRINAEHIRIADQFVEVPGGTNNNNYANVQLIVEIAERTGVSAVWPGWGHASENPELPDALTAKGIVFLGPPASSMNALGDKVGSALIAQAAGVPTLAWSGSHVEIPLELCLDSIPEEMYRKACVTTADEAVASCQMIGYPAMIKASWGGGGKGIRKVNNDDEVKALFKQVQGEVPGSPIFIMRLASQSRHLEVQLLCDQYGNVAALHSRDCSVQRRHQKIIEEGPVTVAPRETVKELEQAARRLAKAVGYVGAATVEYLYSMETGEYYFLELNPRLQVEHPVTEWIAEVNLPAAQVAVGMGIPLWQVPEIRRFYGMDNGGGYDIWRKTAALATPFNFDEVDSQWPKGHCVAVRITSENPDDGFKPTGGKVKEISFKSKPNVWGYFSVKSGGGIHEFADSQFGHVFAYGVTRSAAITNMSLALKEIQIRGEIHTNVDYTVDLLNAPDFRENTIHTGWLDTRIAMRVQAERPPWYISVVGGALYKTITTNADTVSEYVSYLIKGQIPPKHISLVHSTISLNIEESKYTIEIVRSGQGSYRLRMNGSLIEANVQTLCDGGLLMQLDGNSHVIYAEEEAGGTRLLIDGKTCLLQNDHDPSRLLAETPCKLLRFLIADGAHVDADVPYAEVEVMKMCMPLLSPAAGVINVLLSEGQAMQAGDLIARLDLDDPSAVKRAEPFEGSFPELSLPIAASGQVHKRCAASLNAARMVLAGYDHAVNKVVQDLVWCLDTPELPFLQWEELMSVLATRLPRRLKSELEGKYSEYKLNVDHVKIKDFPTDMLRKTIEENLAYVSEKEMATIERLVDPLMSLLKSYEGGRESHAHFIVKSLFEEYLSVEELFSDGIQSDVIERLRLQYSKDLQKVVDIVLSHQGVRSKTKLILTLMEKLVYPNPAAYRDQLIRFSSLNHKRYYKLALKASELLEQTKLSELRTSIVRNLSALEMFTEERAGFSLQEKKLAINESMGDLVSAPLPVEDALISLFDCIDQTLQQRVIETYISRLYQPQLVKDSIQLKYQDSAVIALWEFNEGHPDNRLGAMVILKSLESVSTAIGAALKDRSHYASSAGNTVHIVLLDADTQTNTTEDSGDNDQAQDRMDKLSVILKQDIVTADLRAAGIKVISCIVQRDGALMPMRRTFLLSEEKLCYEEEPILRHVEPPLSALLELDKLKVKGYNEMKYTPSRDRQWHIYTLRNTENPKMLHRVFFRTLVRQPSAGNRFMSGHINDVEVGHAEESLSFTSSSILRSLMTAIEELELHAIRTGHSHMYLCILKEQKLLDLVPVSGNTVVDVGQDEATACSLMKEMALKIHELVGARMHHLSVCQWEVKLKLDSDGPASGSWRVVTTNVTSHTCTVDIYREVEDTDSQKLVYHYAASSPGPLHGVTLSNSYQPLSVIDLKRCSARNNRTTYCYDFPLAFETAVRKSWANVSSENNQCYVKATELVFADKNGSWGTPIVPMQRAAGLNDIGMVAWILDMSTPEFPSGRQIIVIANDITFRAGSFGPREDAFFEAVTNLACERKLPLIYMAANSGARIGIADEVKSCFRVEWVDPANPERGFKYIYLNEEDYGRISSSVIAHKTQLDSGEIRWVIDSVVGKEDGLGVENIHGSAAIASAYSRAYEETFTLTFVSGRTVGIGAYLARLGIRCIQRIDQPIILTGFSALNKLLGREVYSSHMQLGGPKIMATNGVVHLTVPDDLGGVSNILRWLSYVPANIGGPLPITKSLDPIDRPVAYIPENTCDPRAAISGIDDSQGKWLGGMFDKDSFVETFEGWAKTVVTGRAKLGGIPVGVIAVETQTMMQLVPADPGQPDSHERSVPRAGQVWFPDSATKTAQAMLDFNREGLPLFILANWRGFSGGQRDLFEGILQAGSTIVENLRTYNQPAFVYIPKAAELRGGAWVVIDSKINPDRIECYAETTAKGNVLEPQGLIEIKFRSEDLQDCMDRLDPELVNLKAKLQGAKHENGSLSDGESLQKSIEARKKQLLPLYTQIAVRFAELHDTSLRMLAKGVIRKVVDWEESRSFFYKRLRRRISEDVLAKEIRGVIGEKFSHKSAVELIKKWYMASEAAEAGSTDWDDDDAFVAWRENPENYEEHIKELRAQRVSQLLSDVAGSSSDLEALPQGLSMLLEKMDPSRRAEFIEEVKKVLK

SEQ ID NO: 975 - DNA, 12501 bp, Poa pratensis
  source 1..12501: mol_type = genomic DNA
cttggttgtttaaacttactgagaggtcgttaatcaatctattaagttcttgttgcatgtctctatctttatgaactgacgattcctatgcgtatgcatctgtcaggtttccaaacctggggtttacacactcggtttatggcactgtgcatttgaagaacactgcaactctgctgtctgtccaaagggagggcaatgggatctacacatctgcccattgttggattcaatgcctccacgacaccatcgctatccactcttcgccagataaattcagctggtgctgcattccaatcttcttccccttcaaggtcatccaagaagaaaagtggccgtgttaagtcaataagggatgatggagatggaagcgtgtcagaccctgcagggcatggccagtctattcgccaaggtaacccgaggaccatctcctttatattttgtggtcaacctcagacttgcatagattattttcttgattgagagcatgtttgttttggtgtaagatatctcgataccgtatcacaaaatgatagttaagaacaaatcgctgcagcaatctgttttgctagatccgagccgcattagattttcttatgcctgagtagacaccctgagccatccggtgtctgtgcattgagattcgcgcagggattggggaaatcaagaatgatcagaaggctagcaccatcgatttagacacaataaaatctctgtcaacttaggtgtaggtggactctattttttatattcaatttgatgttttcttaagggaaagggacacaaaaatacatgtatgtggctgtttaagtacgtatgaccggatgttttgattatataatagttctgaaaaaggatgcctagaaagatttctgataaatgtagttgaaaaaatataaataacattccaaaagttggcaaaccgttgcttcttcttagctgttgtgtaggcttgctcagtttccaatgcatatttggatgtaggtctcgctggcatcatcgacctcccaaaggagggcgcatcagctccggaagtggacatttcacagtaagtacttcagcacacttacattgtagcttagttctcttgaaagaacggggaaaaaatttataacacatttatagttcctagatttcacttgtcttattatcggtacgcttaaatgttgaagtcgtaaattcgttatttgcatagatttacacttctatacatcatagttatacactatgcacctgctgtgagttccaaaaattgaaccattgtcatgtggtgcactgcaatctgtaaggtcttatttctgatataatatagcaataaatcatgtacaacctcgttacactgaccatggtaatgatattgctctttcttttctagtgggtctgaagaccacaggggctcctaccaaatgaatgggatactgaatgaatcacataacgggaagcacgcctctctatctaaggtggttgaattttgtatggcattgggtggaaaaacaccaattcacagtgtgttagttgccaacaatggaatggcagcagccaagttcatgcggagtgtccggacatgggctaacgatacatttgggtcagagaaggcgattcagttgatagctatggcaactccggaagacatgagaataaatgcagagcacattagaatagctgatcagtttgttgaagtacctggtggaacaaacaataacaactatgcaaatgtccaactcatagtggaggtcagtgttgatcagcccttgatgtgcaatttatgcacgagctcctctttgttctctggcatgacatggcaacttcacttttgtagatagcagagagaacaggtgtttctgccgtttggcctggttggggccatgcatctgagaatcctgaacttccagatgcactaacggcaaaaggaattgtttttcttgggccaccagcatcatcaatgaacgcactaggtgacaaggttggttcagctctcattgctcaagcagcaggggttccgactcttgcttggagtggatcacatgtaagcctcacattctctctgataactcatcgcttgatatttgtggtggatgcatcttgtaacctaatggcactttattataggtggaaattccattagaactttgtttggactcgatacccgaggagatgtataggaaagcttgtgttactaccgcggatgaagcagttgcaagttgtcagatgattggctatcctgccatgatcaaggcatcctggggtggcggtggtaaagggattagaaaggtacattattcatttgattgaactgtacccaagaggtgtgggctgtgatattctgtgcgcagttttagcgctaacctttttaacatcttaactcgatatctcttgcaggttaataatgatgatgaggttaaagcactctttaagcaagtacaaggtgaagttcctggctccccaatatttatcatgagacttgcatctcaggttagacttctctgaaatttctattttccaagcatgccgtttctgagttgtatattgtacgtatggaagcttcctttgctcatccttgcaggctagaattgtagtctgtaatctgtaacatggtaattttcattttaatccctctcccctttccttttgtagagtcgacatcttgaagtccagctgctttgtgatcaatatggcaatgtagcagcacttcacagtcgtgattgcagtgtgcaacgacgacaccaaaaggtatgctgctgtgaaacaatcgcttttattacagatcacctgtagttttgatcaaatggttcaactgtctccatttttttttgtaacagattattgaggaaggaccagttactgttgctcctcgtgagacagtaaaagagctagagcaagcagcaaggaggcttgctaaggctgtgggttatgttggtgctgccactgttgaatatctctacagcatggagactggtgaatactattttctggagcttaatccacggttgcaggtttgttcttttgaacactcttcaggacttctattttgttagcagtcgtttacattgttaaatggtctacattcaggttgagcacccagtcactgagtggatagctgaagtaaatttgcctgcagctcaagttgcagttggaatgggtatacccctttggcaggttccaggtaataataatatcattataaaatatttattttctgtcccatgttatttctctgtctaactatctccttattcagagatcaggcgtttctacggaatggacaatggaggaggctacgatatttggaggaaaacagcagctcttgctactccattcaactttgatgaagtagattctcaatggccgaagggtcattgtgtagcagttaggataactagtgagaatccagatgatggattcaagcctactggtggaaaagtaaaggtgggatttcctaatgtgatatctatgtttcaattacactagggtaagtaaactgacctgatcttgactttttcgtatatttcaggagataagctttaaaagtaagccgaatgtctggggatatttctcagttaaggtaagctgttcatagctctgtcgcagtgtcatgttgtttttagttccgcagaaaattagtctgcaagatgttttattcgaattagtattctcatttgggttttgaccaagtattgatccaatcaacaattttttttctccccttcatctgttttcagtctggtggaggcattcatgaatttgcggattctcagtttggtatgttaaatttgacccggtgcatattcctctttgctatacgaagtgatccttacactggaaatttctccttccattacaggacatgtttttgcctatggagtgactagatcagcagcaataaccaacatgtctcttgcattaaaagagattcaaattcgtggagaaattcatacaaacgttgattacactgttgatctcttgaatgtaagtaacaataacaacttgttgaatcctacttttgatgtaatacaaccattttatatccggctttccttcaaaataatcccatgctgtgatttccggtatctttaattcaggccccagacttcagagaaaacacgatccatactggctggctggatactagaatagctatgcgtgtgcaagctgagaggcctccctggtatatttcagtggtcggaggagctctatatgtaagataaaaaactattttaatattactgcaacttttggcaagccaattgtgaaaaacataattagtgtttaattgaaataattgttttgtgctgtagaaaacaataacggccaacgcggacaccgtttctgaatatgttagctatctcatcaagggtcagattccaccaaaggtattgtcttaatgggcttaaactctgtatattgcttgaaggtgaacatttctgaccattgtttttgtgcagcatatatcccttgtccattcaactatttctttgaatatagaggaaagcaaatatacagtaagtgtggcattcctaaaagaaagactctcagttataatgaaatgatagctacaactgatgctcatctgcaccatgtcacagattgagattgtgaggactggacagggtagctacagattgagaatgaatggatcacttatagaagcaaatgttcaaacactatgtgatggtggccttttaatgcaggtaccttctttctttatacttgctcataaatgtgatctagtactgctttaagagttctgatcccttagttgtaatttctccagctggatggaaacagccatgttatttatgctgaagaagaagcgggtggtacacggcttcttattgatggaaagacatgcttgttgcaggtaagaatatgtctgtctgtctgtctgttcctttacttataatcgtagtgtttgatggtaggacttcatatgcttaattatgatttgttactgcattcaccatttggccattagcacttttttaaacacttcattttgaaagataggataaatcggtattatgaagtaatggatggtacagcatgatgtttttcgagatctattctatttcaatggtaaacgtcactgcgtaagcagccagacacatcaggtgatattaaattttatcgacagcagggcatgtgatgtataaggacaacttacatatctgcaatatagctaagagggttccagttctgttatattgattcttctgtttctcaattcttgtttctccaacgacactatttagtattttcaacaatcattaatttatcataatacggcgcaaaaaaaggttagaaggtgtcctttaacactgtcacttaacctatgaaaagcttgtgatcaaatcattttagtgatacaaaagaacaattgaatcctttatgaaattttcgttcactaataatttatgattcttgatcacgctgcattgtatcctcaactaaataatgacaaatcgttttgcagaatgatcatgatccgtcaaggttattagctgagacaccctgtaaacttcttcgtttcttgattgccgatggtgctcatgttgatgctgatgtaccatatgccgaagttgaggttatgaagatgtgcatgcccctcttgtcgcctgctgctggtgtcattaatgttttgttgtctgagggccaggcgatgcaggttatattactgcactttagttgcttctgctgttaataaccattgcatgtgaagcatctgaagttaatatttttttcaggctggtgatcttatagcgagacttgatctcgatgacccttctgctgtgaagagagctgaaccattcgaaggatcttttccagaaatgagccttcctattgctgcttctggccaagttcacaaaagatgtgctgcaagtttgaatgctgctcgaatggtccttgcaggatatgaccacgctgtcaacaaagtaaacatcaagaaccctatatatctattattttgtctcatatttcctggttttctcaaataccattttttaatattaagaattctggattattctgagttcctcattagctttatcttcctttcgctaccaaatggtttcttatctagaagttcttgacgcttgtcttcgcaaatcttgattttaatgcttttctcttatgttcatcatactcatttatgatataggtcgtatttacccttctgctatttttctttctctcagtaaatcatgatagggatgctctttcccttatgtgcgtcatgctcagtacttattatataaatcgtatttatccctgtgctatttttctttctttcataattgatgttttggtttgatggttcctgatcaaacttagcatttgattactttttccattttacttgccttctttttcaggttgtacaagatttggtattgtgcctagatacacctgagcttcctttcctacaatgggaagagcttatgtctgttttagcaactagacttccaagacgtcttaagagtgaggtatgtgataattgatttaatatgcagaatctggcataaagggacattggtacatttaatgtatgataagaagggtcttaaccctcagctaaaagatcatgtcacgtatcgtgatttacattctacattgttcaatcaccttggtaatttgccttaacttatagtgcaacttttagcttcattctaataatgtaattaacattcaaaatatttcacttcaagcttcgtaacatttcgtacttatttaaagttcttatttgattttaaaccagttcttgttcattgcttttctatgcctcttgtgttctgcctcaacggtttctaatttttatgcatccagttggagggtaaatacagtgaatataagttaagtgttgaccatgtgaagatcaaggatttccccaccgagatgcttagagagacaattgaggttagtttttggtttcttatggcatcctagtctatattgtactatgttttgtaacaagttttcttttaggaaaatctttcatatgtttctgagaacgaaatggcgacaattgagaggcttgttgaccctctgatgagcctactgaagtcatatgagggtgggagagaaagccatgcccactttattgtcaagtcccttttcgaggagtatctcttggttgaggaactattcagtgatggcattcaggttatcttacatttcaaaactgagcagatctacttgattcattttctaggggtcgttattttcccttcttttagtatgaaaaatgtatgaactgatgtcattcacgtattataaattgcatcataaccttttgggtgattaagtagcaaaaatatattttacatggtttaagacttatttccttcagaacacttaactcattgatttcctcaaaatgtgccattttgtagtctgacgtgattgaacgcctgcgcctacaacatagtaaagacctccagaaggttgtagacattgttttgtctcaccaggtaaattaccttttggcctaatgacttagtgcaagtgatcactgaagcaatcttcattactgatagtttgatttttgttctagggtgtgagaaacaaaactaagctgatacttacactcatggagaaactggtctatccaaaccctgctgcctacagggatcagctgattcgcttttcttccctcaaccataaaagatattataaggtgacaattacgacctaaagtaatggaagctttttgaataattttgctgtgatatctttggctaatgaattactttcatggtaataatgcagttggcccttaaagctagtgaacttcttgaacaaaccaagctcagtgaactccgcacaagcattgcaaggaacctttcagcgctggagatgttcacggaggaaagggaaggtttctccttgcaagacagaaaattggccattaatgacagcatggaagatttagtcactgccccattgccagttgaagatgcacttgtttctttgtttgattgtagtgatcaatctcttcagcagagagtgattgagacatatatatctcgactgtaccaggtattgcatgagctatgttttttttgatttattatactctccctcagcatttctggaagcatacaataaagtgctcagttaaaataaatcctagataatctaggtgtgggaagatttgatttagaactacttgtgacatgttactgctctgtaagttggctaacttgccaatgatattttcagcctcaacttgtgaaggatagtattcagctgaaatgtcaggattctggtgttaccgctttatgggaattcactgaagggcatcctgagaagagattgggtgctatggttatcctgaaatcactagaatctgtgtcaacagccattggagctgctctaaaggatacatcacagtatgcaagctctgcgggtaacacggtgcatattgctttgttggatgctgatacccaaatgaatacaactgaagataggtatgttcatgtgcagtgttagtgccgatgagtttgctttgtgattcttaaaataaattgatctatttctttcagtggtgataatgaccaagctcaagataggatggacaaactttctgcgatactgaaacaagatattgtcaccgctgatctacgtgctgctggagtcaagattattagttgcattgttcaaagagatggagcactcatgcctatgcgccgtaccttcctcttgtcagaggaaaagctttgttatgaggaagagccgattcttcggcatgtggagcctccactttctgcacttcttgagttggtatgtaactccatcaaactgactgcacggttttttgatacactttaatgccttttgttttattatttgctacttgtattaatttagcctactattgatacaggataaattgaaagtgaaaggatacaatgagatgaagtatacaccatcacgtgatcgtcaatggcatatatacacacttagaaatactgaaaatcccaaaatgttgcacagggtatttttccgaactcttgtcagacaacccagtgctggcaacaggtttacatccggccatatcagtgatgttgaagtgggacatgctgaggaatctctttcatctacatcaagcagcatattaagatcgttgatgactgctatagaagaattggagcttcacgcgatcaggactggccattctcatatgtacttgtgcatattgaaagagcaaaagcttcttgacctcgttcctgtttcagggtaagcttgcatatcgttctttttgcggaacatatattccttgctcttctgtttagccttctcaacaagcttttcatcttactcaggaacactgttgtggatgttggtcaagatgaagctactgcatgctctcttttgaaagaaatggctctaaagatacatgagcttgttggtgcaagaatgcatcatctttctgtatgccaatgggaagtgaaacttaagttggacagcgatgggcctgccagtggtagctggagagttgtaacaactaatgttactggtcacacctgcactgtggatgtaagttttatccccttgcctgcatggaactaatgaaactaaagtggacatatgccacttatacatggaactatcatctttgattctcataaaataagctatcatcttcgtttagtttgttatcatttccacctcgtttatggtctgaagctcatggtgcttttgatgcttttagatctaccgggaggtcgaagatacagaatcacagaaactagtataccactctgccgcaccgtcatctggtcctttgcatggtgtcgcactgaataattcgtatcagcctttgagtgttattgatctaaaacgatgctctgctaggaacaacagaacgacatactgctatgattttccattggttagtatctatctctctctatattatgttagcaggtttgtattggtattacatgtcctaaatctgacatgaactcaaaaatgtaggcattcgaaactgcagtgcggaagtcatggtctaacatttccagtgaaagcaaccaatgttatgttaaagcgacagagctggtgtttgctgaaaagaatgggtcgtggggcactcctataattcctatgcagcgtgctgctgggctcaatgacattggtatggtggcctggatcttggacatgtccactcctgaatttcccagtggcagacagattattgttatcgcaaatgatattacttttagagctggatcatttggcccaagggaagatgcattttttgaaactgttaccaacctagcttgtgagaagaagcttccacttatctacttggctgcaaactctggtgctcggattggcattgctgatgaagtaaaatcttgcttccgtgttgcatggaatgatgatagctgccctgaacgtggatttgactaccaatatctgactgaagaagactatggtcgtattagctcttcagttatagcgcacaagatgcagctagatagtggcgaaattaggtgggttatcgattctgttgtggggaaggaggatggactaggcgtggagaacatacatggaagtgctgctattgccagtgcttattctagggcatacgaggagacatttacacttacatttgttactggacgaactgttggaataggagcctatcttgctcgacttggcatacggtgcatacagcgtactgaccagcccattattttgaccgggtattctgccctgaacaagcttctcgggcgggaagtgtacagctcccacatgcagttgggtggtcccaaaatcatggcgaccaatggtgttgtccatctgactgttccagatgaccttgaaggtgtttctaatatactgaggtggctcagctatgttcctgcaaacattggtggacctcttcctattacaaaatctttggacccaatagacagacccgttgcatacatccctgagaatacatgtgatcctcgtgcagctatcagcggcattgatgacagccaagggaaatggttgggtggcatgtttgacaaagacagttttgtggagacatttgaaggatgggcgaagacagtagttactggcagagcaaaacttggagggattcctgtgggtgttatagctgtggagacacagaccatgatgcagctcgtccccgctgatccaggccagcctgattcccatgagcggtctgttcctcgtgctgggcaagtctggtttccagattctgctactaagacggcgcaggcgatgttggacttcaaccgtgaaggattacctctgttcatccttgcaaactggagaggcttctctggtgggcaaagagatctttttgaaggaattctgcaggctgggtcaacaattgttgagaaccttaggacatacaatcagcctgcctttgtatatatccccaaggctgcagagctacgtggaggggcttgggtcgtgattgatagcaagataaacccagatcggattgagtgctacgctgagaggaccgcaaagggcaatgttctcgaacctcaagggttgattgagatcaagttcaggtcagaggagctccaagaatgcatgggtaggcttgatccacaattgataagtatgaaagcagaactcgagggagcaaagcatgaaaatggaagtctatctgacgttgaatcccttcagaagagcatagaagctcgaaagaaacacttgctgcctttgtacactcaaatcgcggtacggtttgctgaattgcatgacacttccctcagaatggctgctaaaggtgtgatcaggaaagttgtagactgggaagactctcggtctttcttctacaagagattacggaggaggatatccgaggacgttcttgcgaaggaaattagaggagtaattggtgagaagttttctcataaatcagcggtcgagctgatcaagaaatggtacttggcttctgaggcagctgtagcaggaagcaccgactgggatgatgatgatgcttttgttgcctggagggagaaccctgaaaactataaggagtatatcaaagagcttagggctcaaagggtatctcagttgctctcagatgttgcaggctccacttcagatttgcaagccttgccgcagggtctttccatgctactagataaggtacgcatacttacggctttacctgcatctgtttatttgcaagtagtttgtcgaggttgagtaaaatgtggccaccttcatatgcacttgtatgttaccaaacaatgctgctatgttttcatacatagtatcgtatgaaataatgtctaagacgcttttctttggaaactttgttcagatggatccctctaagagagcacagtttattgaggaagtcaggaaggtcctgaaatgatggaaatgataccaacacatccaatacaatatgtgcatgatatctgtttctcttgaagtacatatatagaaggataatcttggccaaccattatttttgtgaacttgttggtggtctttattattcaaggttgctttcggaccccctcc

SEQ ID NO: 976 - protein, 2323 aa, Poa pratensis
MGSTHLPIVGFNASTTPSLSTLRQINSAGAAFQSSSPSRSSKKKSGRVKSIRDDGDGSVSDPAGHGQSIRQGLAGIIDLPKEGASAPEVDISHGSEDHRGSYQMNGILNESHNGKHASLSKVVEFCMALGGKTPIHSVLVANNGMAAAKFMRSVRTWANDTFGSEKAIQLIAMATPEDMRINAEHIRIADQFVEVPGGTNNNNYANVQLIVEIAERTGVSAVWPGWGHASENPELPDALTAKGIVFLGPPASSMNALGDKVGSALIAQAAGVPTLAWSGSHVEIPLELCLDSIPEEMYRKACVTTADEAVASCQMIGYPAMIKASWGGGGKGIRKVNNDDEVKALFKQVQGEVPGSPIFIMRLASQSRHLEVQLLCDQYGNVAALHSRDCSVQRRHQKIIEEGPVTVAPRETVKELEQAARRLAKAVGYVGAATVEYLYSMETGEYYFLELNPRLQVEHPVTEWIAEVNLPAAQVAVGMGIPLWQVPEIRRFYGMDNGGGYDIWRKTAALATPFNFDEVDSQWPKGHCVAVRITSENPDDGFKPTGGKVKEISFKSKPNVWGYFSVKSGGGIHEFADSQFGHVFAYGVTRSAAITNMSLALKEIQIRGEIHTNVDYTVDLLNAPDFRENTIHTGWLDTRIAMRVQAERPPWYISVVGGALYKTITANADTVSEYVSYLIKGQIPPKHISLVHSTISLNIEESKYTIEIVRTGQGSYRLRMNGSLIEANVQTLCDGGLLMQLDGNSHVIYAEEEAGGTRLLIDGKTCLLQNDHDPSRLLAETPCKLLRFLIADGAHVDADVPYAEVEVMKMCMPLLSPAAGVINVLLSEGQAMQAGDLIARLDLDDPSAVKRAEPFEGSFPEMSLPIAASGQVHKRCAASLNAARMVLAGYDHAVNKVVQDLVLCLDTPELPFLQWEELMSVLATRLPRRLKSELEGKYSEYKLSVDHVKIKDFPTEMLRETIEENLSYVSENEMATIERLVDPLMSLLKSYEGGRESHAHFIVKSLFEEYLLVEELFSDGIQSDVIERLRLQHSKDLQKVVDIVLSHQGVRNKTKLILTLMEKLVYPNPAAYRDQLIRFSSLNHKRYYKLALKASELLEQTKLSELRTSIARNLSALEMFTEEREGFSLQDRKLAINDSMEDLVTAPLPVEDALVSLFDCSDQSLQQRVIETYISRLYQPQLVKDSIQLKCQDSGVTALWEFTEGHPEKRLGAMVILKSLESVSTAIGAALKDTSQYASSAGNTVHIALLDADTQMNTTEDSGDNDQAQDRMDKLSAILKQDIVTADLRAAGVKIISCIVQRDGALMPMRRTFLLSEEKLCYEEEPILRHVEPPLSALLELDKLKVKGYNEMKYTPSRDRQWHIYTLRNTENPKMLHRVFFRTLVRQPSAGNRFTSGHISDVEVGHAEESLSSTSSSILRSLMTAIEELELHAIRTGHSHMYLCILKEQKLLDLVPVSGNTVVDVGQDEATACSLLKEMALKIHELVGARMHHLSVCQWEVKLKLDSDGPASGSWRVVTTNVTGHTCTVDIYREVEDTESQKLVYHSAAPSSGPLHGVALNNSYQPLSVIDLKRCSARNNRTTYCYDFPLAFETAVRKSWSNISSESNQCYVKATELVFAEKNGSWGTPIIPMQRAAGLNDIGMVAWILDMSTPEFPSGRQIIVIANDITFRAGSFGPREDAFFETVTNLACEKKLPLIYLAANSGARIGIADEVKSCFRVAWNDDSCPERGFDYQYLTEEDYGRISSSVIAHKMQLDSGEIRWVIDSVVGKEDGLGVENIHGSAAIASAYSRAYEETFTLTFVTGRTVGIGAYLARLGIRCIQRTDQPIILTGYSALNKLLGREVYSSHMQLGGPKIMATNGVVHLTVPDDLEGVSNILRWLSYVPANIGGPLPITKSLDPIDRPVAYIPENTCDPRAAISGIDDSQGKWLGGMFDKDSFVETFEGWAKTVVTGRAKLGGIPVGVIAVETQTMMQLVPADPGQPDSHERSVPRAGQVWFPDSATKTAQAMLDFNREGLPLFILANWRGFSGGQRDLFEGILQAGSTIVENLRTYNQPAFVYIPKAAELRGGAWVVIDSKINPDRIECYAERTAKGNVLEPQGLIEIKFRSEELQECMGRLDPQLISMKAELEGAKHENGSLSDVESLQKSIEARKKHLLPLYTQIAVRFAELHDTSLRMAAKGVIRKVVDWEDSRSFFYKRLRRRISEDVLAKEIRGVIGEKFSHKSAVELIKKWYLASEAAVAGSTDWDDDDAFVAWRENPENYKEYIKELRAQRVSQLLSDVAGSTSDLQALPQGLSMLLDKMDPSKRAQFIEEVRKVLK

SEQ ID NO: 977 - DNA, 12651 bp, Poa pratensis
  source 1..12651: mol_type = genomic DNA
ttcattggaggattgcgtttctgacctattttagtcctagagcattttggttgtttaaacttactgagaggtcgttaatcaatccataaagttctttttgcatgtctctatctctatgaactgacgattcctatgtttatgcatctgtcaggtttccaaacctggggtttacacacgcagtttatggcactgtgcatctgaagaacactgcaactctgctgtctgtccaaagggagggcaatgggatccacgcatttgcccatcgttggatttaatgcctccacaacaccatcgctatccactcttcgccagataaattcagctggtgctgcattccaatcttcttccccttcaagatcttccaagaagaaaagtcgccgtgttaagtcaataagggatgacggcgatggaagcgtgtcagaccctgcagggcatggccagtctattcgccaaggtaacccgaggaccatctcctttatattttgtggtcaacctcagacttgcatagattattttctttgattgagagcatgattgttttggtgtataagatatctcaataccgtatcacaaaatgatacgtagttaagaacaaatcgctgcagcaatctgtttagctagatctgagtcgcattagattttcttatgtctaagtagacaccctgagccatccggtgtctgtgcattgagattcgcgcatggattggggaaatcaagattgatcagaaggctagcaccatcaacatagacataataaaatctctgtcaacttaggtgtagatggactctatttttaatattcagtttgaggttttcttaagagaaagggacacaaaaatacatgtatgtcgcagtttaagtatgtatgacggagtgttttgattatataatagttctggaaaagaaggatgcctagaaagattttctgataaatgtagttgaaaaaataaaagtaacattccaaaagttggcaaactgttgcttcttcttagctgttgtgtaggcttgctcagtttccaatgcatatttggatgtaggtctcgctggcatcatcgatctcccaaaggagggcgcatcagctccggaagtggacatttcacagtaagtacttcagcacacttacattgtagctcagttatcttgaaagaacatggaaaaatttataacacatttataattcctagatttcacttgtcttattatcggtacgcttaaatgttcaagtcgtaaattcgttattctcatagatttacacttctatacaccatagttatacactatgcacctgctgtgagttccaaaaattgaaccattgtcatgtggtgcactgcaatctgtaaggttttatttttgatataatatagctataaatcatgtacaacctcgttacagtgaccatggtaatgactttgctctttctttgttagtgggtctgaagaccacaggggctcctaccaaatgaatgggatactgaatgaatcacataacgggaagcacgcctctctatctaaggtcgttgagttttgtatggcattgggtggaaaaacaccaattcacagtgtattagtcgccaacaatggaatggcagcagctaagttcatgcggagtgtccggacatgggctaatgatacatttgggtcagagaaggcgattcagttgatagctatggcaactccggaagacatgagaataaatgcagagcacattagaatagctgatcagtttgttgaagtacctggtggaacaaacaataacaactatgcaaatgtccaactcatagtggaggtcagtattggtcatcccttgatgtgcaatttatgcacgagctcctctttgttcttttagtatgacatggcaacttcacttttgtagatagcagagagaacaggtgtttctgccgtttggcctggttggggccatgcatctgagaatcctgaacttccagatgcactaacggcaaaaggaattgtttttcttgggccaccagcatcatcaatgaacgcactaggtgacaaggttggttcagctctcattgctcaagcagcaggggttccgactcttgcttggagtggatcacatgtaagcctcactttctctttgataactcatcgcctgatatttgtggtggatgcatcttgtaacctaatggaactttattataggtggaaattccattagaactttgtttggactcgatacctgaggagatgtataggaaagcttgtgttactaccgcggatgaagcagttgcaagttgtcagatgattggctatcctgccatgatcaaggcatcctggggtggcggtggtaaagggattagaaaggtacattattcatttgattgaagtgtacccaagaggtgtgggctgtgatattctgttcgcagtcttagcactaacctttttaacatcttaactcgatatctcttgcaggttaataatgatgatgaggttaaagcactctttaagcaagtacaaggtgaagttcctggctccccaatatttatcatgagacttgcagctcaggttagacttctctggaatttctatttcctttgctcatccttgcaggctagaactgtattctgtaatctgtaatatggtaattttcattttaatccctctcccctttccttttgtagagtcgacatcttgaagtccagctgctttgtgatcaatatggcaatgtagcagcacttcacagtcgtgattgcagtgtgcaacgacgacaccaaaaggtatgctgctccagagtgaaaccatcgcttttattacaggtctacctgtagttttgatcaaatggttcaactgtcttcattttttgtttgttgtaacagattattgaggaaggaccagttactgttgctcctcgtgagacagtgaaagagctagagcaagcagcaaggaggcttgctaaggctgtgggttatgtcggtgctgctactgtcgaatatctctacagcatggagactggtgaatactatttcctggagcttaatccacggttgcaggtttgttcttttgaacactcttcaggacttctattttgttggcagtcgtttacattgttaaatgttctacattcaggttgagcacccagtcactgagtggatagctgaagtaaatttgcctgcagctcaagttgcagttggaatgggtatacccctttggcaggttccaggtaataataataatatcattgtaaaatatttttttctgtcccatgttatttctgtgtctaactatctccttattcagagatcaggcgtttctacggaatggacaatggaggaggctatgatatttggaggaaaacatcagctcttgctactccattcaactttgatgaagtagattctcaatggccgaagggtcattgtgtagcagttaggataactagtgagaatccagatgatggattcaagcctactggtggaaaagtaaaggtgggatttcctaatgtgatatctatgtttcagttacactagggtaagtaaactgacctgatcttgattttttcgtatatttcaggagataagctttaaaagtaagccgaatgtctggggatatttctcagttaaggtaagctgttcatagatggtggaggcagaaattaatctgcaagatgtttaattcgaattagtattctcatttgggttttgaccaagtattgatccaatcaacaaatgttttttctccccttcatctgttttcagtctggtggaggcattcatgaatttgcggattctcagtttggtatgttaaatttgacccggtgcatattcctctttgctatacgaactgatccttacactggaaattgctccttccattacaggacatgtttttgcctatggagtgactagatcagcagcaataaccaacatgtctcttgcattaaaagagatccaaattcgtggagaaattcatacaaacgttgattacactgttgatctcttgaatgtaagtaacaataacaacttgttgaatcctacttttgatgaaatacaaccattttatatccggctttccttcaaaataatcccatgctgtggtttccggtatctttaattcaggccccagacttcaaagaaaacacgatccatactggctggctggatactagaatagctatgcgtgtgcaagctgagaggcctccctggtatatttcagtggttggaggagctctatatgtaagataaaaaactattttaatgttactgcaacttttgcaagccaattgtgaaaaacacaattagtgtttaattgaaatcattgttttgtgctgtagaaaacaataacggccaacgcggacaccgtttctgaatatgttagctatctaatcaagggtcagattccaccaaaggtattggcttaatgggcttaaactctgtatattgcttgaaggtgaacattgctgaccattgtttttgtgcagcatatatcccttgtccattcaactatttctttgaatatagaggaaagcaaatatacagtaagtgtgacattcctaaaagaaagactcagttataatgaaatgatagctacaactgatgctcatctgcaccatgtcacagattgagatcgtgaggagtggacagggtagctacagattgagaatgaatggatcacttattgaagcaaatgttcaaacactatgtgatggtggccttttaatgcaggtaccttctttctttatacttgctcataaatgtgatctaaggttgcaaagtactgctttaagagttctgatcctttagttgtaatttctccagctggatggaaacagccatgttatttatgctgaagaagaagcgggtggtacacggcttcttattgatggaaagacatgcttgttgcaggtaagaatattctgtctgtctgttcctttacttataatcgtagtgtttgatggtaggacttcatatgcttaattgtgaatttttactgcattcaccatttggccattagcacttatttttaaactcttcattttgaaaagaaaagataaatcggtattatgaactaatggatggtacatcatgatgtttttcgagatctattctatgtcaatggtaaacgtcactgcctaagcactaagcagccagacacatcaggtgatattaaattttatcgacagcagggcatgtgatgtataaggacaacttacatagctgcaatatagctaagagagttccagttctgttatattgccttttctgtttctcgattcttgtttctccaacgacactatttagtattttcaacaatcattaatttatcataatatggcgcaaaaaaaggttagaatgtgtcctttaacacagtcatttaacctatgaaaagcttgtgataaaatcattttagtgatacaaaagaacaattgaatcctttatgaatttttctttcactaataatttgtgattcttgatcgcattgtatccttaactaaataaatgacaaatcgttttgcagaatgatcatgatccgtcaaggttattagctgagacaccctgcaaacttcttcgtttcttgattgccgatggtgctcatgttgatgctgatgtgccatatgcggaagttgaggttatgaagatgtgcatgcccctcttgtcgcctgctgctggtgtcattaatgttttgttgtctgagggccaggcgatgcaggttatattactgcaacgaaactactgtactttcgttgcttctgctgttaataaccattgcatgtgaagcatctgaagttaatattttttcaggctggtgatcttatagcgagacttgatctcgatgacccttcagctgtgaagagagctgaaccattcgaaggatcttttccagaaatgagccttcctattgctgcttctggccaagttcacaaaagatgcgctgcaagtttgaatgctgctcgaatggtccttgcaggatatgaccatgctgtcaacaaagtaaacatcaagaaccctacagtaacaatatttttattattttgtctcatgtttccgggttttctcaaataccattttttaatactccctccgattggaaatgattggcatagatttgtcttagtacggatgtatctagacgttagatacgtccatattttgacaaatctatgccaaccatttcagatcggagggagtattgagaattctggattattctgagttcctcgttagctttatcttcctttcgctaccaaatggtttctaatctatagaagttcttgacgcttgtcttcgcaaatcttgattttaatgctcttctcttatgttcatcatactcatttatgatataggtcgtatttatccttctgctattttctttctctcagtaaatcatgatagggatgctctttcccttatgtgcgtcatgctcagtacttattatataaatcgtatttatccctgtgctatttttctttctttcataattgatgttttggtttgatggttcctgatcaaacttagcaattgattacattttcctttttccttgccttctttttcaggttgtacaagatttggtatggtgcctagatacacctgagcttcctttcctacaatgggaggagcttatgtctgttttagcaactagacttccaagacgtcttaagagtgaggtatgtgataattgatatagtatgcagaatctggcataaagggacattgatacatttaatttatgaaaagaagggtcttaaccctcagctaaaagatcatgtcacgtatcgtgatttacattctacattgttcaatcaccttggtaatttgccttaacttattgtgcaacttttagctttattctaataatgtaatcaacattcagaatatttcacttcaatcttcgtaacatttggtacttatttaaagaagttcgtatttgattttaaaccagttcttgttcattgcttttctatacctttcttgtgttctgcctcaacggtttctaatttttatgcatccagttggagggtaaatacagcgaatataagttaaatgttgaccatgtgaagatcaaggatttccccaccgagatgcttagacagacaattgaggtcagtttttggtttctcatggcatcctagtctatattgcactattttgtgtaacaagttttcttttaggaaaatcttgcatatgtttctgagaatgaaatggcgacaattgagaggcttgttgaccctctgatgagcctactgaagtcatatgagggtgggagagaaagccatgcccactttattgtcaagtcccttttcgaggattatctcttggttgaggaactattcagtgatggcattcaggttatcttacatttcaaaacagacagatctacttaattcatttttaggggtcgttattttcctacttttagtatgaaacatgtatgaactgatgtcattcacgtattacataagacttatttccttcagaacacttcactcattgatttcctcaaaatgtgccattttgtagtctgacgtgattgaacgcctgcgcctacaacatagtaaagacctccagaaggttgtagacattgttttgtctcaccaggtaaattaccttttggcctaatgacttagtgcaagtgatcactgaagcaatcttcgttactgatagtttgatttttgttctagggtgtgagaaacaaaactaagctcatacttacactcatggagaaactggtctatccaaaccctgctgcctacagggatcagctgattcgcttttcttccctcaaccataaaagatattataaggtgacacttacgacctagagtaatggaagctttttgaataattttgttgtgatatcttaggctaatgaattactttcatggtaataatgcagttggcccttaaagctagtgaacttcttgaacaaaccaagctcagtgaactccgcacaagcattgccaggaacctttcagcgctggagatgttcacggaggaaagggaaggtttctccttgcaagacagaaaattggccattaatgatagcatggaagatttagtcactgcccactgccagttgaagatgcacttgtttctttgtttgattgtagtgatcaatctcttcagcagagagtgattgagacgtatatatctcgactgtaccaggtattgcatgagctatgttttttgatttattataatctccctcagcatttctggaagcatacaataattcctaatgaaataaaatgctcagtttttctttgaaataaatcctagataatctaggtgtgggaagatttgatttagaactgtttgtagacatgtcactgctctgtaagttggctaacttgccaatgatattttcagcctcaacttgtgaaggatagtatccagctgaaatatcaggattctggtgttagcgctttatgggaattcactgaagggcatcctgagaagagattgggtgctatggttatcctgaaatcactagaatctgtgtcaacagccattggagctgctctaaaggatacatcacagtatgcaagctctgtgggtaacacggtgcatattgctttgttggatgctgatacccaaatgaatacaactgaagataggtatgttcatgtgcagtattagtgccgatgagtttgctttgtgcaattctgaatataattaatctatttctttcagtggtgataatgaccatgctcaagataggatggacaaactttctgctgtactgaaacaagatattgtcaccgctgatctacgtgctgctggagtcaagattattagttgcattgttcaaagagatggagcactcatgcctatgcgccgtaccttcctcttatcagaggaaaagctttgttatgaggaagagccgattcttcggcatgtggagcctccactttctgcacttcttgagttggtatgtaactccatcaaactgactgcacggttttttgatacactttaacgcttttcgtcttattatttgctacttgtattgatttagcctactgttgatacaggataaactgaaagtgaaaggatacaatgagatgaagtatacaccatcacgtgatcgtcaatggcatatatacacacttagaaatactgaaaatcccaaaatgttgcacagggtatttttccgaactcttgtcagacaacccagtgctggcaacaggtttgcatccggccatatcagtgatgtcgaagtgggacatgctgaggaatctctttcatctacatcaagcagcatattaagatcgttgatgactgctatagaagaattggagcttcacgcgatcaggactggccattctcatatgtacttgtgcatattgaaagagcaaaagcttcttgacctcgttcctgtttcagggtaagcctgcacatcgttctttttgcagaacatatttgccttgctcgtctgtttagccttctcaacgagcttttcatcttactcaggaacactgttgtggatgttggtcaagatgaagctactgcatgctctcttttgaaagaaatggctctaaagatacatgaacttgttggtgcaagaatgcatcatctttctgtatgccagtgggaagtgaaacttaaattggacagcgatgggcctgccagtggtagctggagagttgtaacaactaatgttactggtcacacctgcacagtggatgtaagttttatccccttgcctgcatggaactaatgaaactaaagtggacatatgtcacttatacatggaactatcatctttgattctcataaaaaagaaccatcatcttcgtttagtttgttatcatttccacctcatttatggtctgaagctcatggtgcttttaatgcttttagatctaccgggaggtcgaagatacagaagcacggaaactagtataccactctgccgtatcgtcatctggtcctttgcatggtgtcgcactgaataattcgtatcagcctttgagtgttattgatctaaaacgatgctctgctaggaacaacagaacgacatactgctatgattttccattggttagtatctctctctctctctctatgtattattttagcaggtttgtattggtattacatgtcctaaatctgacaagaactcaaaaatgtaggcatttgaaactgcagtgcggaagtcatggtctaacatttctagtgaaaacaaccaatgttatgttaaagcgacagagctggtgtttgctgaaaagaatgggtcgtggggcactcctataattcctatgcagcgtgctgctgggctcaatgacattggtatggtggcctggatcttggacatgtccactcctgaatttcccagtggcagacagattattgttatcgcaaatgatattacgtttagagctggatcatttggcccaagggaagatgcattttttgaaactgttaccaacctagcttgtgagaagaagcttccacttatctacttggctgcaaactctggtgctcggattggcattgctgatgaagtaaaatcttgcttccgtgttgcatggaatgatgatagctgccctgaaaaaggatttgactaccaatatctgactgaagaagactatggtcgtattagctcttcagttatagcgcacaagatgcagctagatagtggcgaaattaggtgggttatcgattctgttgtggggaaggaggatggactaggtgtggagaacatacatggaagtgctgctattgccagtgcttattctagggcatacgaggagacatttacacttacatttgttactggacgaactgttggaataggagcctatcttgctcgacttggcatacggtgcatacagcgtactgaccagcccattattctgactgggtattctgccctgaacaagcttctcgggcgggaagtgtacagctcccacatgcagttgggtggtcccaaaatcatggcgaccaatggtgttgtccatctgactgttccagatgaccttgaaggtgtttctaatatattgaggtggcttagctatgttcctgcaaacattggtggacctcttccgattacaaaatctttggacccaatagacagacccgttgcatacatccctgagaatacatgtgatcctcgtgcagccatcagcggcattgatgacagccaagggaaatggttgggtggcatgtttgacaaagacagttttgtggagacatttgaaggatgggcgaagacagtagttactggcagagcaaaacttggagggattcctgtgggtgttatagctgtggagacacagaccatgatgcagctcgtccccgctgatccaggccagcctgattcccatgagcggtctgttcctcgtgcggggcaagtctggtttccagattctgctactaagacggcgcaggcgatgttggacttcaaccgtgaaggattacctctgttcatccttgcaaactggagaggcttctctggtgggcaaagagatctttttgaaggaattctgcaggctgggtcaacaattgttgagaaccttaggacatacaatcagcctgcctttgtatatatccccaaggctgcagagctacgtggaggggcttgggtcgtgattgatagcaagataaacccggatcgcattgagtgctatgctgagaggactgcaaagggcaatgttctcgaacctcaagggttgattgagatcaagttcaggtcagaggagctccaagaatgcatgggtaggcttgatccacaattgataagtatgaaagaagaactcctgggagcaaagcatcaaaatggaagcctatctgacgttgaatcccttcagaagagcatagaagctcgaaagaaacacttgctgcctttgtacactcaaatcgcggtacggtttgctgaattgcatgacacttccctcagaatggctgctaaaggtgtgatcaggaaagttgtggactgggaagactctcggtctttcttctacaagagattacggaggaggatatccgaggacgttcttgcgaaggaaattagaggcgtaattggtgagaagttttctcataaatcagcggtcgagctgatcaagaaatggtacttggcttctgaggctgctgtagcaggaagcactgactgggatgatgacgatgcttttgttgcctggagggagaaccctgaaaactataaggagtatatgaaagagcttagggctcaaagggtatctcagttgctctcagatgttgcaggctccagttcagatttgcaagccttgccgcagggtctttccatgctactagataaggtacgcatacttacggctttacctgcatctgtttatttgcaagtagtttgtcgaggttgagtaaaatgtggccatcttcatatgcacttgtatgtaaccaaacaatgctgctatctttttcatatatagtatcgtatgaaataatgtctgagacgcttttctttggaaactttgttcagatggatccctctaagagagcacagtttatcgaggaagtcaggaaggtcctgaaatgatggaaatgataccaacacatccaataaaatatgcgcatgatatctgtttcacttgaagtacatatatagaaggataatctgggccaaccattatttttgtgaacttgttggtggtctttattattcaaggcacaagttgctttcggaccccctccggctggttgatgagtgtaattgg

SEQ ID NO: 978 - protein, 2323 aa, Poa pratensis
MGSTHLPIVGFNASTTPSLSTLRQINSAGAAFQSSSPSRSSKKKSRRVKSIRDDGDGSVSDPAGHGQSIRQGLAGIIDLPKEGASAPEVDISHGSEDHRGSYQMNGILNESHNGKHASLSKVVEFCMALGGKTPIHSVLVANNGMAAAKFMRSVRTWANDTFGSEKAIQLIAMATPEDMRINAEHIRIADQFVEVPGGTNNNNYANVQLIVEIAERTGVSAVWPGWGHASENPELPDALTAKGIVFLGPPASSMNALGDKVGSALIAQAAGVPTLAWSGSHVEIPLELCLDSIPEEMYRKACVTTADEAVASCQMIGYPAMIKASWGGGGKGIRKVNNDDEVKALFKQVQGEVPGSPIFIMRLAAQSRHLEVQLLCDQYGNVAALHSRDCSVQRRHQKIIEEGPVTVAPRETVKELEQAARRLAKAVGYVGAATVEYLYSMETGEYYFLELNPRLQVEHPVTEWIAEVNLPAAQVAVGMGIPLWQVPEIRRFYGMDNGGGYDIWRKTSALATPFNFDEVDSQWPKGHCVAVRITSENPDDGFKPTGGKVKEISFKSKPNVWGYFSVKSGGGIHEFADSQFGHVFAYGVTRSAAITNMSLALKEIQIRGEIHTNVDYTVDLLNAPDFKENTIHTGWLDTRIAMRVQAERPPWYISVVGGALYKTITANADTVSEYVSYLIKGQIPPKHISLVHSTISLNIEESKYTIEIVRSGQGSYRLRMNGSLIEANVQTLCDGGLLMQLDGNSHVIYAEEEAGGTRLLIDGKTCLLQNDHDPSRLLAETPCKLLRFLIADGAHVDADVPYAEVEVMKMCMPLLSPAAGVINVLLSEGQAMQAGDLIARLDLDDPSAVKRAEPFEGSFPEMSLPIAASGQVHKRCAASLNAARMVLAGYDHAVNKVVQDLVWCLDTPELPFLQWEELMSVLATRLPRRLKSELEGKYSEYKLNVDHVKIKDFPTEMLRQTIEENLAYVSENEMATIERLVDPLMSLLKSYEGGRESHAHFIVKSLFEDYLLVEELFSDGIQSDVIERLRLQHSKDLQKVVDIVLSHQGVRNKTKLILTLMEKLVYPNPAAYRDQLIRFSSLNHKRYYKLALKASELLEQTKLSELRTSIARNLSALEMFTEEREGFSLQDRKLAINDSMEDLVTAPLPVEDALVSLFDCSDQSLQQRVIETYISRLYQPQLVKDSIQLKYQDSGVSALWEFTEGHPEKRLGAMVILKSLESVSTAIGAALKDTSQYASSVGNTVHIALLDADTQMNTTEDSGDNDHAQDRMDKLSAVLKQDIVTADLRAAGVKIISCIVQRDGALMPMRRTFLLSEEKLCYEEEPILRHVEPPLSALLELDKLKVKGYNEMKYTPSRDRQWHIYTLRNTENPKMLHRVFFRTLVRQPSAGNRFASGHISDVEVGHAEESLSSTSSSILRSLMTAIEELELHAIRTGHSHMYLCILKEQKLLDLVPVSGNTVVDVGQDEATACSLLKEMALKIHELVGARMHHLSVCQWEVKLKLDSDGPASGSWRVVTTNVTGHTCTVDIYREVEDTEARKLVYHSAVSSSGPLHGVALNNSYQPLSVIDLKRCSARNNRTTYCYDFPLAFETAVRKSWSNISSENNQCYVKATELVFAEKNGSWGTPIIPMQRAAGLNDIGMVAWILDMSTPEFPSGRQIIVIANDITFRAGSFGPREDAFFETVTNLACEKKLPLIYLAANSGARIGIADEVKSCFRVAWNDDSCPEKGFDYQYLTEEDYGRISSSVIAHKMQLDSGEIRWVIDSVVGKEDGLGVENIHGSAAIASAYSRAYEETFTLTFVTGRTVGIGAYLARLGIRCIQRTDQPIILTGYSALNKLLGREVYSSHMQLGGPKIMATNGVVHLTVPDDLEGVSNILRWLSYVPANIGGPLPITKSLDPIDRPVAYIPENTCDPRAAISGIDDSQGKWLGGMFDKDSFVETFEGWAKTVVTGRAKLGGIPVGVIAVETQTMMQLVPADPGQPDSHERSVPRAGQVWFPDSATKTAQAMLDFNREGLPLFILANWRGFSGGQRDLFEGILQAGSTIVENLRTYNQPAFVYIPKAAELRGGAWVVIDSKINPDRIECYAERTAKGNVLEPQGLIEIKFRSEELQECMGRLDPQLISMKEELLGAKHQNGSLSDVESLQKSIEARKKHLLPLYTQIAVRFAELHDTSLRMAAKGVIRKVVDWEDSRSFFYKRLRRRISEDVLAKEIRGVIGEKFSHKSAVELIKKWYLASEAAVAGSTDWDDDDAFVAWRENPENYKEYMKELRAQRVSQLLSDVAGSSSDLQALPQGLSMLLDKMDPSKRAQFIEEVRKVLK

SEQ ID NO: 979 - DNA, 101 bp, synthetic construct
  misc_feature 1..101: note = Synthetic
  source 1..101: mol_type = other DNA
tacattcccatggctgcagagctacgaggaggggcttgggttgtcgttgatagcaagataaacaccgaccgcattgagtgctatgctgagaggactgcaaa

SEQ ID NO: 980 - DNA, 201 bp, synthetic construct
  misc_feature 1..201: note = Synthetic
  source 1..201: mol_type = other DNA
gctcgactattgttgagaaccttaggacatacaatcagcctgcctttgtctacattcccatggctgcagagctacgaggaggggcttgggttgtcgttggaagcaagataaacaccgaccgcattgagtgctatgctgagaggactgcaaaaggcaatgttctggaaccgcaagggttaattgagatcaagttcaggtcag